(19) United States
(12) Patent Application Publication
(10) Pub. No.: US 2015/0329609 A1
(43) Pub. Date: Nov. 19, 2015

(54) CHIMERIC DYSTROPHIN PROTEINS TO TREAT DYSTROPHINOPATHIES

(71) Applicant: Sujata ACHARJEE, New York, NY (US)

(72) Inventor: Sujata ACHARJEE, New York, NY (US)

(21) Appl. No.: 14/744,922

(22) Filed: Jun. 19, 2015

Related U.S. Application Data
(63) Continuation-in-part of application No. 14/635,012, filed on Mar. 2, 2015.
(60) Provisional application No. 62/014,191, filed on Jun. 19, 2014.
(60) Provisional application No. 61/946,961, filed on Mar. 3, 2014.

(51) Int. Cl. C07K 14/47; C12N 7/00; C07K 14/005

(52) U.S. Cl. CPC C07K 14/47; C07K 14/005; C12N 7/00; C12N 2760/20233; A61K 38/00

(57) ABSTRACT

A chimeric protein that is a fusion construct of a series of functional domains is used to deliver a therapeutic agent to a human subject suffering from disease. In some embodiments, the chimeric protein includes a therapeutic region and a transportation region. The transportation region allows the chimeric protein to be moved across a cellular membrane of an affected cell within the subject. The therapeutic region can be effective in the treatment of, for example, muscular dystrophy, diastrophic dysplasia, malignant melanoma, porphyria, alpha-1 antitrypsin deficiency, Aicardi-Goutieres syndrome, cystic fibrosis, progeria, Marfan syndrome, tuberous sclerosis, adrenoleukodystrophy, and the like.

### CROSS-REFERENCE TO RELATED APPLICATIONS

[0001] This patent application is a continuation-in-part patent application of U.S. patent application Ser. No. 14/635,012, filed Mar. 2, 2015, which claims the benefit of U.S. Provisional patent application No. 61/946,961, filed Mar. 3, 2014. This patent application also claims a benefit to the filing date of U.S. Provisional patent application No. 62/014,191, filed Jun. 19, 2014. The contents of each of the above-identified patent applications are incorporated herein by reference in their entireties.

### FIELD OF THE DISCLOSURE

[0002] Disclosed is a chimeric or fusion protein including a therapeutic construct that is designed for use in the treatment of human subjects suffering from diseases such as muscular dystrophy, diastrophic dysplasia, malignant melanoma, porphyria, alpha-1 antitrypsin deficiency, Aicardi-Goutieres syndrome, cystic fibrosis, progeria, Marfan syndrome, tuberous sclerosis, adrenoleukodystrophy, and the like.

### BACKGROUND OF THE DISCLOSURE

[0003] The Dystrophin Glycoprotein complex (DGC) is a very crucial structural component of skeletal and cardiac muscles. It is comprised of dystrophin and a plurality of proteins associated with it and imparts structural stability to the muscle membrane. The physical interactions between the proteins of the DGC form the basis for mechanical linking of the outside of the membrane to the inside and play an important role in mediating biological signaling process. These proteins form an intricate network which stabilizes the membrane as it contracts and relaxes. These interactions are essential in maintaining the structural integrity of the muscle membrane. Lack of any of these components owing to mutation compromises the structural stability leading to muscle damage.

[0004] Dystrophin was originally identified through its deficiency in the lethal neuromuscular disorder, Duchenne Muscular Dystrophy (DMD). Skeletal and cardiac muscles that lack functional full-length dystrophin protein are extremely susceptible to tear and damage from the contraction-relaxation activity. In the heart, aortic banding experiments performed on the dystrophin-deficient mdx mouse similarly result in accelerated cardiac damage. These studies demonstrated the essential role of dystrophin and the DGC in protecting the plasma membrane against contraction-induced damage.

[0005] The absence of dystrophin in DMD patients leaves the muscle membrane fragile and susceptible to damage upon contraction, leading to destruction of the DGC with loss of mechanical stability and proper mechano-transduction signaling. The dystrophin deficient myofibers undergo repeated rounds of contraction mediated injury with consequent myofiber necrosis that ultimately results in the replacement of myofibers by fibrous and fat tissue; a progressive degeneration and failure of regeneration efficiency also occurs owing to the continuous depletion of muscle precursor cells or satellite cells and their incapability to proliferate, multiply, and differentiate.

[0006] Dystrophin has four functional domains: a calponin-like actin binding domain at the amino terminal, a central rod domain of 24 spectrin-like repeats, a cysteine-rich region at the carboxy terminal, and an extreme helical carboxy terminal region. The amino terminal actin binding domain is responsible for anchoring dystrophin to cytoskeletal filamentous actin. Within the central rod domain, spectrin repeats 11 through 17 constitute a second site for binding actin. The cysteine rich region interacts with the intracellular portion of the transmembrane protein beta-dystroglycan and anchors dystrophin to the sarcolemma. The extreme carboxyl-terminal mediates its interaction with syntrophins.

[0007] The human dystrophin gene is the largest gene characterized so far. It contains 79 exons, several splicing sites and a number of tissue specific promoters that result in a range of transcripts which form amino terminal truncated dystrophin proteins of varying lengths. Dystrophin is a huge gene with an open reading frame that is 11058 nucleotides long, making it a difficult target to work with. The large size of the dystrophin gene is also responsible for its high frequency of spontaneous mutation, with most of the mutations being deletions. The extent of severity caused by these mutations varies depending on the kind of deletion. Where a deletion results in complete absence of dystrophin protein due to disruption of the reading frame of the gene, severe forms of muscular dystrophy or DMD can occur. Deletions which lead to the formation of truncated proteins result in milder forms of muscular dystrophy such as Becker Muscular Dystrophy. One deletion which removes a central part of dystrophin protein encompassing 5,106 base pairs, almost half the coding sequence, has been reported to cause a very mild form of muscular dystrophy with patients being ambulant even at the age of 61.

[0008] Dystrophin gene is one of the first genes identified by reverse genetics. DMD is an X-linked muscular dystrophy with an incidence of one in 3500 young males. DMD is one of the most common hereditary diseases known. The onset can be between the age of 3 to 5 yrs. and depending on the severity of the disease the affected males become non-ambulatory by the age of 13. The other clinical features include scoliosis, muscle weakness and damage, muscle hypertrophy, cardiomyopathy, mental retardation and very high serum creatine kinase levels. This disease ultimately causes death between the ages of 15 to 25 years. The most common cause of death in these patients is respiratory or cardiac failure. Tens of thousands of individuals are living with DMD in the United States, Europe, Australia, Canada, Israel, and Japan alone.

[0009] DMD has also been reported in a number of animals including mouse, cats and dogs. Mdx mice that have a premature stop codon mutation on exon 23 of the dystrophin gene, leading to a lack of the mature protein, have long been used as an animal model to study the pathogenesis of the disease. The absence of dystrophin results in an acute onset of skeletal muscle necrosis around 3 weeks of post-natal life, followed by an extensive period of degeneration and regeneration until necrosis gradually decreases and a relatively low level is reached in adult mice (3-4 months) with pathology stabilization. However, the pathology is far more benign than in DMD.

[0010] Vesicular Stomatitis Viruses have long been known to cause a number of diseases in humans, such as rabies. These viruses enter their hosts by making an envelope of proteins around them also known as VSV-G glycoproteins which facilitate the fusion of viral membrane with the host cell membrane. VSV-G has been widely used as a tool for gene transfer by pseudo typing viral vectors with VSV-G envelope. Recently it has been shown that LDL receptors present in the membrane of mammalian cells serve as a receptor for the VSV-G proteins and port of entry for the vesicular stomatitis viruses. This probably justifies the pantropic nature of vesicular stomatitis viruses as the LDL receptors are present in a wide range of mammalian cells and tissues.

[0011] Utrophin is the autosomal homologue (paralogue) of dystrophin. The gene for utrophin located at chromosome 6 in humans, encodes for a protein with 3,433 amino acids with a predicted mass of 395 KD. Interest in the biology of utrophin has been enhanced by a potential role for the protein in novel therapies for Duchenne muscular dystrophy (DMD). Utrophin is structurally related to dystrophin and almost ubiquitously expressed, unlike dystrophin. In developing and regenerating muscles, expression of utrophin precedes dystrophin and utrophin can be detected along the entire muscle sarcolemma. At birth or in adult healthy muscles, utrophin is then replaced by dystrophin in sarcolemma and its expression is confined to the neuromuscular junctions and myotendinous junctions. Studies of mice in which the utrophin gene has been disrupted provided a useful line of evidence to understand the function of utrophin. While the phenotype of mice lacking utrophin appears normal, mice lacking both dystrophin and utrophin exhibit severe phenotype, developing spinal deformity and dying prematurely. In DMD and mdx striated muscle, the distribution of utrophin changes so that it is expressed throughout the sarcolemma and thereby somewhat compensates for the lack of dystrophin.

[0012] Cell penetrating peptides (CPPs) are short peptide sequences which are capable of passing through the membrane bilipid layer and transporting molecules across the cell membrane. The CPPs, also known as the protein transduction domains are employed to facilitate the entry and exit of biomolecules like oligonucleotides, siRNA, proteins and liposomes into and from the cells. The transcription transactivating protein (Tat) and penetratin are among the first CPPs to be described and paved the way to the discovery of other naturally occurring CPPs. A minimal peptide sequence from the Tat protein was identified as required for cellular uptake. Penetratin is a 16-merpeptide derived from the third helix of the homeodomain of Antennapedia. Proof-of-concept of the CPPs in vivo application for the delivery of small peptides and large proteins used the chimeric peptide Transportan, derived from the N-terminal fragment of the neuropeptide galanin, linked to mastoparan, a wasp venom peptide was a great breakthrough. Another transferrin receptor (TfR) binding peptide was identified that bound on a distinct site from transferrin binding site and was internalized with the human TfR via endosomal pathway.

[0013] DMD therapies that are currently being developed include DNA- and cell-based therapies, as well as drugs which aim to modulate cellular pathways or gene expression. Attempts have been made to restore the expression of full-length functional protein or short truncated protein either via exon-skipping, gene therapy, stem cells, or small molecules to induce read-through of premature stop-codon mutations. Other promising approaches include small molecules or recombinant proteins to enhance the dystrophin surrogate utrophin, and stabilize or reduce degradation of DGC.

[0014] Although the approaches previously used are promising, alternative strategies need to be developed because of the limitations of these approaches, e.g. oligonucleotides used for exon-skipping could not be effectively delivered to all the non-skeletal target muscle tissues such as heart; ataluren aimed to induce read-through of premature stop codons in dystrophin gene could only be used for a patient subpopulation exhibiting mutations displaying premature stop codons; ataluren was not potent enough to show any significant effect during clinical trials on patients treated with the drug. Currently there is no treatment available for DMD and current therapies rely in delaying the progression of the disease by clinically using Prednisone and supportive care with a mean life expectancy in the thirties.

[0015] What is desired therefore is a simple yet effective system and method for treating patients with DMD. What is also desired is a singular system and method that allows for treatment of multiple types of dystrophinopathy across a plurality of patient types, resulting in increasing or maintaining the structural integrity of the muscle fiber, limiting muscle damage, and improved muscle strength.

### BRIEF SUMMARY

[0016] Disclosed herein is a system and method to alleviate the symptoms associated with certain conditions by delivering chimeric proteins in patients exhibiting symptoms of those conditions.

[0017] In some embodiments, the present disclosure is directed to a chimeric protein comprising a dystrophin complexed with a transportation region, wherein the transportation region allows for transport of the chimeric protein across a cellular membrane. In some embodiments, the transportation region is a cell penetrating peptide. In some embodiments, the dystrophin is a truncated dystrophin. In some embodiments, the at least one cell penetrating peptide is selected from the group consisting of transcription transactivating protein, penetratin, transportan, transferrin receptor binding peptide, and combinations thereof. In some embodiments, at least one cell penetrating peptide is attached to either the N-terminal or the N- and the C-terminal. In some embodiments, the at least one cell penetrating peptide is complexed at the N-terminal of the dystrophin. In some embodiments, a utrophin is complexed with the dystrophin. In some embodiments, the transportation region is vesicular stomatitis virus G.

[0018] In some embodiments, at least a portion of a sequence of the chimeric protein has a nucleotide sequence selected from the group consisting of: SEQ. ID NO.: 13, SEQ. ID NO.: 15, SEQ. ID NO.: 17, SEQ. ID NO.: 19, and pharmaceutical equivalents thereof. In some embodiments, at least a portion of a sequence of the chimeric protein has an amino acid sequence selected from the group consisting of: SEQ. ID NO.: 14, SEQ. ID NO.: 16, SEQ. ID NO.: 18, SEQ. ID NO.: 20, and pharmaceutical equivalents thereof. In some embodiments, at least a portion of a sequence of the chimeric protein has a nucleotide sequence selected from the group consisting of: SEQ. ID NO.: 21, SEQ. ID NO.: 23, SEQ. ID NO.: 25, SEQ. ID NO.: 27, and pharmaceutical equivalents thereof. In some embodiments, at least a portion of a sequence of the chimeric protein has an amino acid sequence selected from the group consisting of: SEQ. ID NO.: 22, SEQ. ID NO.: 24, SEQ. ID NO.: 26, SEQ. ID NO.: 28, and pharmaceutical equivalents thereof.

[0019] In some embodiments, at least a portion of a sequence of the chimeric protein has a nucleotide sequence selected from the group consisting of: SEQ. ID NO.: 29, SEQ. ID NO.: 31, SEQ. ID NO.: 33, SEQ. ID NO.: 35, SEQ. ID NO.: 37, and pharmaceutical equivalents thereof. In some embodiments, at least a portion of a sequence of the chimeric protein has an amino acid sequence selected from the group consisting of: SEQ. ID NO.: 30, SEQ. ID NO.: 32, SEQ. ID NO.: 34, SEQ. ID NO.: 36, SEQ. ID NO.: 38, and pharmaceutical equivalents thereof.

[0020] In some embodiments, at least a portion of a sequence of the chimeric protein has a nucleotide sequence selected from the group consisting of: SEQ. ID NO.: 39, SEQ. ID NO.: 41, and pharmaceutical equivalents thereof. In some embodiments, at least a portion of a sequence of the chimeric protein has an amino acid sequence selected from the group consisting of: SEQ. ID NO.: 40, SEQ. ID NO.: 42, and pharmaceutical equivalents thereof.

[0021] In some embodiments, the present disclosure is directed to a method of making a chimeric protein for use in the treatment of a condition, the method comprising the steps of, cloning a nucleotide sequence into a vector, the nucleotide sequence coding for a chimeric protein comprising dystrophin complexed with a transportation region wherein the transportation region allows for transport of the chimeric protein across a cellular membrane, transfecting the vector into a host cell, proliferating the host cell, and isolating the chimeric protein from the host cell. In some embodiments, the step of isolating the chimeric protein from the host cell includes the step of isolating the chimeric protein from a lysate of the host cell. In some embodiments of the method of making a chimeric protein, the nucleotide sequence comprises a sequence selected from the group consisting of: SEQ. ID NO.: 13, SEQ. ID NO.: 15, SEQ. ID NO.: 17, SEQ. ID NO.: 19, SEQ. ID NO.: 29, SEQ. ID NO.: 31, SEQ. ID NO.: 33, SEQ. ID NO.: 35, SEQ. ID NO.: 37, SEQ. ID NO.: 39, SEQ. ID NO.: 41.

[0022] In some embodiments of the method of making a chimeric protein, wherein the nucleotide sequence comprises a sequence selected from the group consisting of: SEQ. ID NO.: 21, SEQ. ID NO.: 23, SEQ. ID NO.: 25, SEQ. ID NO.: 27.

[0023] In some embodiments of the method of making a chimeric protein, the medical condition includes a muscular dystrophy, diastrophic dysplasia, malignant melanoma, porphyria, alpha-1 antitrypsin deficiency, Aicardi-Goutieres syndrome, cystic fibrosis, progeria, Marfan syndrome, tuberous sclerosis, adrenoleukodystrophy, and the like.

### BRIEF DESCRIPTION OF THE DRAWINGS

[0024] The subject matter that is regarded as the invention is particularly pointed out and distinctly claimed in the claims at the conclusion of the specification. The foregoing and other objects, features, and advantages of the invention will be apparent from the following detailed description taken in conjunction with the accompanying drawings.

[0025] FIG. 1 shows a schematic view of a chimeric protein for the treatment of dystrophinopathies consistent with some embodiments of the present disclosure.

[0026] FIG. 2 shows an immunostaining of HEK-293 cells transfected with VSV-G only against VSV-G antibody.

[0027] FIG. 3 shows an immunostaining of HEK-293 cells transfected with the chimeric dystrophin protein shown in FIG. 1 having VSV-G at the N-terminus against anti-VSV-G antibody.

[0028] FIG. 4 shows an immunostaining of DMD patient cells with an anti-dystrophin antibody treated with 0.5 m1 of conditioned media derived from HEK-293 cells transfected with chimeric dystrophin having VSV-G at the N-terminus.

[0029] FIG. 5 shows an immunostaining of DMD patient cells with an anti-dystrophin antibody treated with 2.0 m1 of conditioned media derived from HEK-293 cells transfected with chimeric dystrophin having VSV-G at the N-terminus.

[0030] FIG. 6 shows a flowchart of a method of treating a subject having a medical condition using the chimeric protein shown in FIG. 1.

[0031] FIG. 7 shows a flowchart of a method of making the chimeric protein shown in FIG. 1 for use in the treatment of a condition.

[0032] FIG. 8 shows another embodiment of the method of making a chimeric protein for use in the treatment of a condition as shown in FIG. 7.

[0033] FIG. 9 shows a flowchart of a method of making a chimeric protein shown in FIG. 1 for use in the treatment of a condition.

### DETAILED DESCRIPTION

[0034] The embodiments disclosed by the invention are only examples of the many possible advantageous uses and implementations of the innovative teachings presented herein. In general, statements made in the specification of the present application do not necessarily limit any of the various claimed inventions. Moreover, some statements may apply to some inventive features but not to others. In general, unless otherwise indicated, singular elements may be in plural and vice versa with no loss of generality. In the drawings, like numerals refer to like parts through several views.

[0035] FIG. 1 shows a schematic diagram of a chimeric protein consistent with some embodiments of the present disclosure. In some embodiments, a transportation region is fused to the N-terminal end of a therapeutic region. In some embodiments, the transportation region is fused to the C-terminal end of the therapeutic region. In some embodiments, a cleavage region is disposed between the therapeutic region and the transportation region. As used herein, the term “transportation regions” may also be interchangeably referred to as “delivery mechanisms” or “carriers”. In some embodiments, the transportation region is VSV-G. In some embodiments, the therapeutic region is a full length dystrophin protein. In some embodiments, the therapeutic region is a truncated dystrophin protein. In some embodiments, the cleavage region is a cleavage site for membrane metalloproteases.

[0036] In some embodiments, the chimeric protein of the present disclosure has a nucleotide sequence wherein at least a portion of the sequence is selected from the group consisting of: SEQ. ID NO.: 1, SEQ. ID NO.: 3, SEQ. ID NO.: 5, SEQ. ID NO.: 7, and pharmacologically acceptable equivalents thereof. In some embodiments, the chimeric protein of the present disclosure has an amino acid sequence wherein at least a portion of the sequence is selected from the group consisting of: SEQ. ID NO.: 2, SEQ. ID NO.: 4, SEQ. ID NO.: 6, SEQ. ID NO.: 8, and pharmacologically acceptable equivalents thereof. In some embodiments, the sequence for the chimeric protein has at least 90%, at least 95%, at least 96%, at least 97%, at least 98%, or at least 99% sequence identity with at least one of SEQ. ID NO.: 1, SEQ. ID NO.: 2, SEQ. ID NO.: 3, SEQ. ID NO.: 4, SEQ. ID NO.: 5, SEQ. ID NO.: 6, SEQ. ID NO.: 7, SEQ. ID NO.: 8. In some embodiments, any suitable mutations, substitutions, additions, and deletions may be made to the chimeric protein so long as the pharmacological activity of the resulting variant chimeric protein is retained.

[0037] SEQ. ID NO.: 1 is a nucleotide sequence of a dystrophin-VSV-G chimeric protein, with the VSV-G at the N-terminus, consistent with some embodiments of the present invention.

[0038] SEQ. ID NO.: 2 is an amino acid sequence of a dystrophin-VSV-G chimeric protein, with the VSV-G at the N-terminus, consistent with some embodiments of the present invention.

[0039] SEQ. ID NO.: 3 is a nucleotide sequence of a truncated dystrophin-VSV-G chimeric protein, with the VSV-G at the N-terminus, consistent with some embodiments of the present invention.

[0040] SEQ. ID NO.: 4 is an amino acid sequence of a truncated dystrophin-VSV-G chimeric protein, with the VSV-G at the N-terminus, consistent with some embodiments of the present invention.

[0041] SEQ. ID NO.: 5 is a nucleotide sequence of a dystrophin-VSV-G chimeric protein, with the VSV-G at the C-terminus, consistent with some embodiments of the present invention.

[0042] SEQ. ID NO.: 6 is an amino acid sequence of a dystrophin-VSV-G chimeric protein, with the VSV-G at the C-terminus, consistent with some embodiments of the present invention.

[0043] SEQ. ID NO.: 7 is a nucleotide sequence of a truncated dystrophin-VSV-G chimeric protein, with the VSV-G at the C-terminus, consistent with some embodiments of the present invention.

[0044] SEQ. ID NO.: 8 is an amino acid sequence of a truncated dystrophin-VSV-G chimeric protein, with the VSV-G at the C-terminus, consistent with some embodiments of the present invention.

[0045] SEQ. ID NO.: 9 is a nucleotide sequence of a dystrophin-VSV-G chimeric protein without cleavage site with VSV-G at N-terminal, consistent with some embodiments of the present invention.

[0046] SEQ. ID NO: 10 is an amino acid sequence of a dystrophin-VSV-G chimeric protein without cleavage site with VSV-G at N-terminal, consistent with some embodiments of the present invention.

[0047] SEQ. ID NO: 11 is a nucleotide sequence of a truncated dystrophin-VSV-G chimeric protein without a cleavage site with VSV-G at N-terminal, consistent with some embodiments of the present invention.

[0048] SEQ. ID NO: 12 is an amino acid sequence of a truncated dystrophin-VSV-G chimeric protein without a cleavage site with VSV-G at N-terminal, consistent with some embodiments of the present invention.

[0049] SEQ. ID NO: 13 is a nucleotide sequence of a penetratin-dystrophin chimeric protein, consistent with some embodiments of the present invention.

[0050] SEQ. ID NO: 14 is an amino acid sequence of a penetratin-dystrophin chimeric protein, consistent with some embodiments of the present invention.

[0051] SEQ. ID NO: 15 is a nucleotide sequence of a tat-dystrophin chimeric protein, consistent with some embodiments of the present invention.

[0052] SEQ. ID NO: 16 is an amino acid sequence of a tat-dystrophin chimeric protein, consistent with some embodiments of the present invention.

[0053] SEQ. ID NO: 17 is a nucleotide sequence of a transportan-dystrophin chimeric protein, consistent with some embodiments of the present invention.

[0054] SEQ. ID NO: 18 is an amino acid sequence of a transportan-dystrophin chimeric protein, consistent with some embodiments of the present invention.

[0055] SEQ. ID NO: 19 is a nucleotide sequence of a TfRbp-dystrophin chimeric protein, consistent with some embodiments of the present invention.

[0056] SEQ. ID NO: 20 is an amino acid sequence of a TfRbp-dystrophin chimeric protein, consistent with some embodiments of the present invention.

[0057] SEQ. ID NO: 21 is a nucleotide sequence of a penetratin-truncated-dystrophin chimeric protein, consistent with some embodiments of the present invention.

[0058] SEQ. ID NO: 22 is an amino acid sequence of a penetratin-truncated-dystrophin chimeric protein, consistent with some embodiments of the present invention.

[0059] SEQ. ID NO: 23 is a nucleotide sequence of a tat-truncated-dystrophin chimeric protein, consistent with some embodiments of the present invention.

[0060] SEQ. ID NO: 24 is an amino acid sequence of a tat-truncated-dystrophin chimeric protein, consistent with some embodiments of the present invention.

[0061] SEQ. ID NO: 25 is a nucleotide sequence of a transportan-truncated-dystrophin chimeric protein, consistent with some embodiments of the present invention.

[0062] SEQ. ID NO: 26 is an amino acid sequence of a transportan-truncated-dystrophin chimeric protein, consistent with some embodiments of the present invention.

[0063] SEQ. ID NO: 27 is a nucleotide sequence of a TfRbp-truncated-dystrophin chimeric protein, consistent with some embodiments of the present invention.

[0064] SEQ. ID NO: 28 is an amino acid sequence of a TfRbp-truncated-dystrophin chimeric protein, consistent with some embodiments of the present invention.

[0065] SEQ. ID NO: 29 is a nucleotide sequence of a penetratin-dystrophin-utrophin chimeric protein, consistent with some embodiments of the present invention.

[0066] SEQ. ID NO: 30 is an amino acid sequence of a penetratin-dystrophin-utrophin chimeric protein, consistent with some embodiments of the present invention.

[0067] SEQ. ID NO: 31 is a nucleotide sequence of a tat-dystrophin-utrophin chimeric protein, consistent with some embodiments of the present invention.

[0068] SEQ. ID NO: 32 is an amino acid sequence of a tat-dystrophin-utrophin chimeric protein, consistent with some embodiments of the present invention.

[0069] SEQ. ID NO: 33 is a nucleotide sequence of a transportan-dystrophin-utrophin chimeric protein, consistent with some embodiments of the present invention.

[0070] SEQ. ID NO: 34 is an amino acid sequence of a transportan-dystrophin-utrophin chimeric protein, consistent with some embodiments of the present invention.

[0071] SEQ. ID NO: 35 is a nucleotide sequence of a TfRbp-dystrophin-utrophin chimeric protein, consistent with some embodiments of the present invention.

[0072] SEQ. ID NO: 36 is an amino acid sequence of a TfRbp-dystrophin-utrophin chimeric protein, consistent with some embodiments of the present invention.

[0073] SEQ. ID NO: 37 is a nucleotide sequence of a dystrophin-utrophin chimeric protein, consistent with some embodiments of the present invention.

[0074] SEQ. ID NO: 38 is an amino acid sequence of a dystrophin-utrophin chimeric protein, consistent with some embodiments of the present invention.

[0075] SEQ. ID NO: 39 is a nucleotide sequence of a VSV-G-dystrophin-utrophin chimeric protein, consistent with some embodiments of the present invention.

[0076] SEQ. ID NO: 40 is an amino acid sequence of a VSV-G-dystrophin-utrophin chimeric protein, consistent with some embodiments of the present invention.

[0077] SEQ. ID NO: 41 is a nucleotide sequence of a dystrophin-utrophin-VSV-G chimeric protein, consistent with some embodiments of the present invention.

[0078] SEQ. ID NO: 42 is an amino acid sequence of a dystrophin-utrophin-VSV-G chimeric protein, consistent with some embodiments of the present invention.

[0079] Recombinant and chimeric proteins have been available in the market as therapies for various conditions and have proven to be extremely potent in curing diseases such as arthritis. In some embodiments, the present disclosure is directed to a dystrophin (or functional mutant or truncated form of dystrophin) protein fused either at the N-terminal or C-terminal with a VSV-G (or variants of VSV-G) protein with or without a short linker between the two proteins, which will be a cleavage site for membrane metalloproteases (MMPs). This therapy will rely on administering biologically effective amounts of recombinant dystrophin protein that will be transduced in different muscle tissues and ameliorate the pathologies associated with the lack of dystrophin. The therapy will allow the subject to compensate for the lack of certain functional protein production.

[0080] In some embodiments, VSV-G protein serves as the transportation region or carrier for delivering the dystrophin protein to various tissues. LDL receptors, through which VSV-G establishes initial contact to enter the cells, are present in a wide range of tissues. Therefore, this approach mitigates the issues related to the delivery of dystrophin protein at different target sites found in previous approaches. In some embodiments, the VSV-G used in the chimeric protein of the instant application is a wild-type VSV-G. In some embodiments, the VSV-G is a variant of wild-type VSV-G. Any suitable mutations, substitutions, additions, and deletions may be made to the VSV-G so long as the cellular membrane transport activity of the resulting variant VSV-G is retained. In some embodiments, suitable VSV-G variants include the thermostable and serum resistant mutants of VSV-G, which include the following point mutations to wild-type VSV-G: S162T, T230N, T368A, or combined mutants T230N+T368A, or K66T+S162T+T230N+T368A. In some embodiments, variant VSV-G has at least 90%, at least 95%, at least 96%, at least 97%, at least 98%, or at least 99% sequence identity with wild-type VSV-G.

[0081] Sometimes fusing a protein with another protein interferes with the function of the proteins and leads to a decrease in their biological activity. In order to overcome this problem, in some embodiments, a cleavage region including a cleavage site for MMPs is provided. In some embodiments, a cleavable linker is disposed between the dystrophin and VSV-G. In such an embodiment, dystrophin will only be released from the chimeric construct with VSV-G when it is cleaved by MMPs. MMPs are overexpressed during various pathologic conditions and inflammation, including muscular dystrophy. Therefore, when the chimeric dystrophin-VSV-G protein reaches the sites of inflammation upon delivery, the MMPs cleave the chimeric protein and release the dystrophin protein for incorporation into the muscle cells and treatment of the subject's dystrophinopathy. In some embodiments, the MMP cleavage site encodes for amino acids PLGLWAL, which is a known putative cleavage site for all the MMPs. In some embodiments, the MMP cleavage site comprises a sequence defined by the amino acids P-X-X-Hy-(S/T), wherein P identifies proline, X is any residue, Hy is a hydrophobic residue, and S/T may either serine or threonine. In some embodiments, the MMP cleavage site is selected from the sequences PLGLWAL, P-X-X-Hy-(S/T), and variants and mutations thereof. In some embodiments, the cleavage site is eliminated.

[0082] This strategy can also be extended to other conditions which are caused by a lack of a single protein by replacing dystrophin with the protein of interest for the respective conditions. In some embodiments, the dystrophin is replaced by another therapeutic construct. In these embodiments, the therapeutic construct would be selected to treat the pathological conditions of other diseases, such as diastrophic dysplasia, malignant melanoma, porphyria, alpha-1 antitrypsin deficiency, Aicardi-Goutieres syndrome, cystic fibrosis, progeria, Marfan syndrome, tuberous sclerosis, adrenoleukodystrophy, and the like. In some embodiments, other proteins may be fused to the N- and C-termini of the proteins included in the chimeric protein. Table 1 below portrays various conditions that may be effectively treated using the chimeric proteins of the present disclosure, as well as the therapeutic constructs that may, in some embodiments, be substituted for dystrophin.

TABLE 1
Therapeutic constructs for incorporation into the chimeric protein of
the present disclosure for use in the treatment of various conditions.

| Condition | Therapeutic Construct |
|---|---|
| diastrophic dysplasia | SLC26A2. A transmembrane glycoprotein |
| | which is a sulfate transporter and a |
| | member of the solute family. |
| malignant melanoma | p16(INK4a) and the p14(ARF); proteins |
| | encoded by the CDKN2A and PTEN |
| | genes. |
| porphyria | Delta-aminolevulinate dehydratase; 5- |
| | aminolevulinate synthase 2; |
| | coproporphyrinogen oxidase; |
| | ferrochelatase; hydroxymethylbilane |
| | synthase; protoporphyrinogen oxidase; |
| | uroporphyrinogen decarboxylase; |
| | uroporphyrinogen III synthase. |
| | Proteins encoded by the ALAD, ALAS2, |
| | CPOX, FECH, HMBS, PPOX, UROD, or |
| | UROS genes. |
| alpha-1 antitrypsin | Alpha-1 antitrypsin. A plasma protein and |
| deficiency | serine protease inhibitor. |
| Aicardi-Goutieres | Proteins encoded by the TREX1, |
| syndrome | RNASEH2A, RNASEH2B, and |
| | RNASEH2C genes. Mutations in these |
| | genes may result in absent or dysfunctional |
| | nuclease enzymes. |
| | Proteins encoded by the SAMHD1 genes. |
| | These proteins may be involved in immune |
| | response and/or inflammatory processes. |
| cystic fibrosis | Cystic fibrosis transmembrane |
| | conductance regulator. A transmembrane |
| | chloride channel protein. |
| progeria | Lamin A; lamin C. Proteins located at the |
| | nuclear lamina. |
| Marfan syndrome | Fibrillin-1. A large extracellular matrix |
| | protein. |
| tuberous sclerosis | Hamartin; tuberin. Hamartin is a |
| | peripheral membrane protein. Tuberin |
| | associates with hamartin in a cytosolic |
| | complex. |
| adrenoleukodystrophy | Adrenoleukodystrophy protein. A |
| | peroxisome membrane protein. |

[0083] In some embodiments, the present disclosure is also directed to a method of using a chimeric protein consistent with the embodiments described above in the treatment of dystrophinopathies. As shown in FIG. 6, un some embodiments, the method of treating a subject having a dystrophinopathy includes the steps of preparing 600 a therapeutic dose of a chimeric protein comprising a therapeutic region, a transportation region, and a cleavage region disposed between the therapeutic region and the transportation region, wherein the transportation region allows for transport of the chimeric protein across a cellular membrane; and administering 610 the therapeutic dose to the subject. As used herein, the term therapeutic dose means any suitable volume and concentration of the chimeric protein to be administered to a subject as part of a prescribed regimen that is effective for treating a dystrophinopathy. The specific dosage is a matter of design choice and may vary with the characteristics of the subject.

### Methods:

[0084] In some embodiments, the present disclosure is also directed to a method of making a chimeric protein consistent with the embodiments described above for use in the treatment of dystrophinopathies. As shown in FIG. 7, in some embodiments, the method of making the chimeric protein includes the steps of cloning 700 a nucleotide sequence into a vector, the nucleotide sequence coding for a chimeric protein comprising a therapeutic region, a transportation region, and a cleavage region disposed between the therapeutic region and the transportation region, wherein the transportation region allows for transport of the chimeric protein across a cellular membrane, transfecting 710 the vector into a host cell, proliferating 720 the host cell, and isolating 730 the chimeric protein from the host cell. In some embodiments, as shown in FIG. 8, isolating step 730 includes the step of isolating 830 the chimeric protein from a lysate of the host cell. Specific examples consistent with some embodiments of the method of making the chimeric protein are as follows:

[0085] The dystrophin protein has been described by Kunkel et al., under patent application Ser. No. 07/136,618 and family ID 22473616, the contents of which are incorporated herein by reference in its entirety. The complete mRNA sequence of human dystrophin protein is available at gene bank under accession number M18533, M17154, M18026, and M20250.

[0086] The following studies were all performed on a chimeric dystrophin protein without a cleavage region and with VSV-G as the transportation region at the N-terminus of the therapeutic dystrophin.

[0087] Plasmid harboring cDNA for full-length Homo Sapiens dystrophin was sourced from Transomic Technologies, 601 Genome Way, Suite 1222, Huntsville, Ala. 35806. Cloning vector pRK-Flag-Myc (Sigma) and pMD2.G (Addgene) harboring the VSV-G cDNA were obtained. The VSV-G protein was cloned at the ApaI and NotI sites of the pRK-Flag-Myc vector thereby replacing the Flag tag with VSV-G. VSV-G protein was cloned by polymerase chain reaction (PCR) using pMD2.G vector as the template and forward and reverse primers as 5′ AAT TAT GGG CCC GAC ACC ATG GAG TGC CTT TTG TAC TTA 3′ and 5′ CTC TAC TTG GCT GAA CCT CGC CGG CGG TTT AGG 3′ respectively.

[0088] Next, PCR was performed to amplify the dystrophin open reading frame (ORF) with forward and reverse primers as CCG TCA GCG GCC GCC ATG CTT TGG TGG GAA GAA GTA and TAC TCT CTC CTG TGT TAC CAG CTG GAG TAC respectively, designed to include restriction enzyme sites Not I and Sal I. The dystrophin ORF was cloned at the Not I and Sal I sites of the pRK-Flag-Myc vector following the VSV-G, yielding the chimeric dystrophin with VSV-G at the N-terminal. The KAPA HiFi HotStart ReadyMix PCR kit was used for performing PCR.

[0089] Dystrophin and truncated dystrophin chimeric gene sequences with N-terminal VSV-G were synthesized by IDT DNA using their propriety technology and put into appropriate vector for protein expression using a baculovirus system. Methods of protein purification using a baculovirus system are well established and well within the capabilities of one having ordinary skill in the art.

[0090] Once the chimeric sequence was generated, it was transfected in mammalian cells to ensure that the chimeric dystrophin protein is being expressed properly. HEK-293 cells were seeded on coverslips in a 6-well plate at a confluence of 60%. Cells were transfected with vectors containing either the VSV-G protein alone or the chimeric dystrophin-VSV-G protein using the Viafect™ reagent from Promega. A day after transfection the media were changed to normal media (10% FBS in DMEM). 48 hours post transfection, the media from the cells was removed.

[0091] As shown in FIGS. 2 and 3, the transfected cells seeded on coverslips were fixed and stained for detection of dystrophin chimeric protein expression and compared to that of VSV-G alone. For fixation, cells were washed in Dulbecco's phosphate buffered saline (DPBS) and fixed in 4% paraformaldehyde solution for 10 minutes. Cells were washed in DPBS again followed by treatment with 0.5% Triton-X-100 for an additional 5 minutes. Following 3 washes in DPBS, cells were blocked for an hour in 10% BSA. Then primary antibody against VSV-G protein (VSV-G-tag Antibody, pAb, Rabbit, source: GenScript) or dystrophin (monoclonal anti-dystrophin, clone MANDYS8) was added at a dilution of 1:100 in 2.5% BSA-DPBS for one and half hours. Cells were again washed in DPBS. Anti-rabbit FITC conjugated secondary antibody against anti-VSV-G primary or Anti-mouse Texas Red conjugated secondary antibody against anti-dystrophin primary were also added at a dilution of 1:100 in 2.5% BSA-DPBS and incubated for 30 minutes. Cells were washed in DPBS and stained with DAPI in DPBS. Cells were mounted in anti-fade mounting medium.

[0092] The stained transfected HEK-293 cells were detected for indirect immunofluorescence under a fluorescence microscope. The transfected cells displayed fluorescence in the cytoplasm confirming the expression of the chimeric protein (FIG. 3). The distribution of the VSV-G protein alone was different from that of the chimeric protein (FIG. 2).

[0093] DMD patient cells (GM05169 and GM03604 A) were sourced from Coriell Institute of Biomedical Research. For treatment of DMD patient cells with conditioned media, GM05169 and GM03604 A cells were seeded onto coverslips in 6-well plate. HEK 293 cells were transfected as described above and the media after being changed 24 hours post transfection was left for another 48 hours. 72 hours post transfection, medium from the transfected cells were collected and centrifuged. Different amounts of conditioned HEK transfection media 2.0 ml, 1.0 ml, and 0.5 ml (making a total volume of 2 ml by adding 15% FBS DMEM media) were added to the DMD patient cells and then cells were fixed and stained as described above.

[0094] DMD patient cells were then analyzed under a fluorescence microscope for chimeric protein transduction from media to patient cells. As shown in FIGS. 4 and 5, treatment of conditioned transfected HEK-293 cell media indeed resulted in the transduction of chimeric protein that was secreted in the media as displayed by the fluorescence in the cytoplasm of patient cells.

[0095] It was postulated that fusion of VSV-G protein with the dystrophin protein would facilitate the entry of the dystrophin protein in the target muscle tissues. VSV-G is a vesicular protein which when overexpressed is secreted in vesicles known as gesicles. It was assumed, therefore, that chimeric dystrophin protein might be secreted as well in the transfection media upon expression. DMD patient cells displaying fluorescence positive for chimeric protein proves that the chimeric protein is secreted in the media of HEK-293 transfected cells and upon treatment of the conditioned media to DMD patient cells, the chimeric protein is taken up by the patient cells.

[0096] As discussed above, in some embodiments, chimeric protein expression and functionality is confirmed by inserting DNA encoding the chimeric protein into baculovirus for recombinant protein production. DNA insertion into the baculovirus for recombinant protein production is accomplished using the commercially available pOET1 transfer plasmid (Oxford Expression Technologies) and recombinant baculovirus stocks are prepared for baculovirus-mediated protein expression according to the manufacturer protocols.

[0097] Chimeric proteins are produced using recombinant baculovirus stocks to infect suspension cultures of insect cells grown in flasks or bioreactors with commercially available cell lines such as Sf9, Sf21 or Tni and commercially available culture media according to manufacturer protocols. Infected cultures are then harvested between 48 and 96 hours post infection and chimeric proteins are purified from culture media or clarified cell lysate by column chromatography involving one or more methods such as affinity, ion exchange, hydrophobic interaction, and size exclusion.

[0098] Purified chimeric proteins are identified by Western blot using one or more dystrophin-specific primary antibodies. Protein purity is determined by densitometry analysis of SDS PAGE stained with SYPRO Orange or Coomassie Blue, and by reverse phase high performance liquid chromatography (RP-HPLC). Protein stability in phosphate buffered saline (PBS) or similar formulation buffer is assessed by analytical size exclusion chromatography (aSEC) to detect changes in protein monodispersity over time and after multiple freeze/thaw cycles. Endotoxin level in purified protein samples is measured by Limulus Amebocyte Lysate (LAL) assay.

[0099] Purified chimeric protein produced by the methods described above is administered in mdx mice for further validation of its activity to improve the pathologic effects observed during dystrophinopathies. All the animal studies are done by The Jackson Laboratory.

[0100] A variant of mdx mouse in a different background (DBA/2J) is used for the studies. Eighteen hemizygous D2.B10-Dmdmdx/J male mutant mice and six DBA/2J male control mice are produced in the Jackson Laboratory Facility. Three groups of 6 D2.B10-Dmdmdx/J males, age 28 days-3 days, are administered the chimeric protein or vehicle for a six week period. A group of 6 DBA/2J male controls, age 28 days-3 days, are administered just the chimeric protein administration vehicle.

[0101] At the end of the treatment period, the following measurements are performed:
[0102] Serum Creatine Kinase (CK) activity. Serum CK is measured with a Beckman Coulter AU Clinical Chemistry analyzer from serum collected by retro-orbital bleeding and frozen immediately and until analysis;
[0103] Evans Blue Dye (EBD) uptake by the skeletal muscle. EBD is injected 24 hours prior to euthanasia but after serum collection for CK measurement. After euthanasia, the gastrocnemius is collected and flash frozen. Muscles are then homogenized, the lysate is cleared, and EBD concentration in the supernatant is measured by spectrophotometry;
[0104] Histology. Hematoxylin and eosin stain for illustration purposes, reticulin stain for muscle fiber morphometry, quantification of the extent of atrophy/hypertrophy and centrally-located nuclei, and Masson Trichrome stain for the visualization of the fibrosis are performed. After sacrifice, one hind limb and one hemi-diaphragm are collected and fixed in paraformaldehyde. Muscles are dissected, paraffin-embedded, and cross-sectioned. Three sections per muscle are prepared to be stained with hematoxylin and eosin for illustration purposes with two mice per group and reticulin stain for automated fiber size measurements and central nuclei counts;
[0105] Anti-dystrophin immunofluorescence on the quadriceps, myocardium, and diaphragm. Tibialis anterior and quadriceps muscles are used. One quadriceps and the heart are flash-frozen without fixation for cryo-sectioning and cross-sections are stained by anti-dystrophin immunofluorescence; and
[0106] RNA extraction and quantification of the following mRNAs in the tibialis anterior: markers of inflammation, markers of fibrosis, markers of muscle fiber regeneration. One tibialis anterior is preserved in RNA. Later, RNAs are extracted, reverse-transcribed, and the following mRNA quantified by SYBR-Green qPCR: Mpeg1 and Lgals3 (macrophages markers), Ly6c1 (pro-fibrotic monocytes marker), Tnf-alpha (inflammatory cytokine), neonatal myosin (fiber regeneration marker), and collagen I.

[0107] In patients suffering from dystroglycanopathies, the function of dystrophin can be replaced by utrophin to some extent. Utrophin, which is otherwise confined to the neuromuscular junctions and myotendinous junctions in the muscles of healthy adult individuals, is over expressed in the muscles of DMD patients and can be found localized along the entire periphery of the muscle fiber. In some embodiments of present application, dystrophin or dystrophin-utrophin chimeric proteins are administered to replace the missing dystrophin protein. In some embodiments, the chimeric protein harbors the N-terminal domain of dystrophin, which is important for binding actin cytoskeleton and C-terminal domain of utrophin that makes association with other members of the DGC.

[0108] In some embodiments, the chimeric protein of the present disclosure comprises a dystrophin complexed with a transportation region. In some embodiments, the transportation region is at least one CPP. In some embodiments, the at least one CPP is selected from the group consisting of transcription transactivating protein, penetratin, transportan, transferrin receptor binding peptide, and combinations thereof.

[0109] In some embodiments, the chimeric proteins described here are tethered to CPPs at the N-terminal followed by the therapeutic region. In some embodiments, the therapeutic region is a dystrophin, truncated dystrophin, or dystrophin-utrophin chimeric protein. One of the challenges of using chimeric proteins for therapeutic use is the delivery of the proteins at the appropriate target sites. The CPPs enhance the entry of these chimeric proteins at the target sites but less likely to interfere with the structural conformation and consequently function of the core protein due to their short size.

[0110] In some embodiments, the chimeric protein includes cell penetrating peptides tethered at the N-terminal of the fully functional dystrophin protein or a truncated functional dystrophin protein. In some embodiments, the chimeric protein includes functional domains from both a dystrophin protein and utrophin. In some embodiments, the chimeric protein includes VSV-G. In some embodiments, the chimeric protein includes both CPPs and VSV-G. In some embodiments, the CPPs or VSV-G are attached to the therapeutic region at the N-terminal or N- and C-terminal r of the dystrophin-utrophin chimeric protein. VSV-G-dystrophin-utrophin fusion protein will facilitate the entry of the protein at the target muscles owing to the presence of LDL receptors in the muscle tissues through which the VSV-G proteins make their entry.

[0111] As shown in FIG. 9, in some embodiments, the present disclosure is directed to a method of making a chimeric protein for use in the treatment of a condition, the method comprising the steps of cloning 900 a nucleotide sequence into a vector, the nucleotide sequence coding for a chimeric protein comprising dystrophin complexed with a transportation region wherein the transportation region allows for transport of the chimeric protein across a cellular membrane, transfecting 901 the vector into a host cell, proliferating 902 the host cell, and isolating 903 the chimeric protein from the host cell.

[0112] In some embodiments, the chimeric protein of the present disclosure has a nucleotide sequence wherein at least a portion of the sequence is selected from the group consisting of: SEQ. ID NO.: 13, SEQ. ID NO.: 15, SEQ. ID NO.: 17, SEQ. ID NO.: 19, SEQ. ID NO.: 21, SEQ. ID NO.: 23, SEQ. ID NO.: 25, SEQ. ID NO.: 27, SEQ. ID NO.: 29, SEQ. ID NO.: 31, SEQ. ID NO.: 33, SEQ. ID NO.: 35, SEQ. ID NO.: 37, SEQ. ID NO.: 39, SEQ. ID NO.: 41, and pharmacologically acceptable equivalents thereof. In some embodiments, the chimeric protein of the present disclosure has an amino acid sequence wherein at least a portion of the sequence is selected from the group consisting of: SEQ. ID NO.: 14, SEQ. ID NO.: 16, SEQ. ID NO.: 18, SEQ. ID NO.: 20, SEQ. ID NO.: 22, SEQ. ID NO.: 24, SEQ. ID NO.: 26, SEQ. ID NO.: 28, SEQ. ID NO.: 30, SEQ. ID NO.: 32, SEQ. ID NO.: 34, SEQ. ID NO.: 36, SEQ. ID NO.: 38, SEQ. ID NO.: 40, SEQ. ID NO.: 42, and pharmacologically acceptable equivalents thereof. In some embodiments, the sequence for the chimeric protein has at least 90%, at least 95%, at least 96%, at least 97%, at least 98%, or at least 99% sequence identity with at least one of SEQ. ID NO.: 13, SEQ. ID NO.: 14, SEQ. ID NO.: 15, SEQ. ID NO.: 16, SEQ. ID NO.: 17, SEQ. ID NO.: 18, SEQ. ID NO.: 19, SEQ. ID NO.: 20, SEQ. ID NO.: 21, SEQ. ID NO.: 22, SEQ. ID NO.: 23, SEQ. ID NO.: 24, SEQ. ID NO.: 25, SEQ. ID NO.: 26, SEQ. ID NO.: 27, SEQ. ID NO.: 28, SEQ. ID NO.: 29, SEQ. ID NO.: 30, SEQ. ID NO.: 31, SEQ. ID NO.: 32, SEQ. ID NO.: 33, SEQ. ID NO.: 34, SEQ. ID NO.: 35, SEQ. ID NO.: 36, SEQ. ID NO.: 37, SEQ. ID NO.: 38, SEQ. ID NO.: 39, SEQ. ID NO.: 40, SEQ. ID NO.: 41, SEQ. ID NO.: 42.

[0113] In some embodiments, any suitable mutations, substitutions, additions, and deletions may be made to the chimeric protein so long as the pharmacological activity of the resulting variant chimeric protein is retained. One or more embodiments of the present invention have been described. Nevertheless, it will be understood that various modifications may be made without departing from the spirit and scope of the invention. Accordingly, other embodiments are within the scope of the following claims.

The application's sequence listing, which the Patent Office published only in electronic form, follows.

SEQUENCE LISTING (42 sequences)

SEQ ID NO: 1 - DNA, 12594 bp, Artificial Sequence
  Nucleotide Sequence of proposed Dystrophin-VSV-G chimeric protein with VSV-G at N-terminal
  misc_feature (1)..(12594)
atgaagtgccttttgtacttagcttttttattcatcggggtgaattgcaagttcaccatagtttttccacacaaccaaaaaggaaactggaaaaatgttccttccaattaccattattgcccgtcaagctcagatttaaattggcataatgacttaataggcacagccttacaagtcaaaatgcccaagagtcacaaggctattcaagcagacggttggatgtgtcatgcttccaaatgggtcactacttgtgatttccgctggtacggaccgaagtatataacacattccatccgatccttcactccatctgtagaacaatgcaaggaaagcattgaacaaacgaaacaaggaacttggctgaatccaggcttccctcctcaaagttgtggatatgcaactgtgacggatgctgaagcagcgattgtccaggtgactcctcaccatgtgcttgttgatgaatacacaggagaatgggttgattcacagttcatcaacggaaaatgcagcaatgacatatgccccactgtccataactccacaacctggcattccgactataaggtcaaagggctatgtgattctaacctcatttccacggacatcaccttcttctcagaggacggagagctatcatccctaggaaaggagggcacagggttcagaagtaactactttgcttatgaaactggagacaaggcctgcaaaatgcagtactgcaagcattggggagtcagactcccatcaggtgtctggttcgagatggctgataaggatctctttgctgcagccagattccctgaatgcccagaagggtcaagtatctctgctccatctcagacctcagtggatgtaagtctcattcaggacgttgagaggatcttggattattccctctgccaagaaacctggagcaaaatcagagcgggtcttcccatctctccagtggatctcagctatcttgctcctaaaaacccaggaaccggtcctgtctttaccataatcaatggtaccctaaaatactttgagaccagatacatcagagtcgatattgctgctccaatcctctcaagaatggtcggaatgatcagtggaactaccacagaaagggaactgtgggatgactgggctccatatgaagacgtggaaattggacccaatggagttctgaggaccagtttaggatataagtttcctttatatatgattggacatggtatgttggactccgatcttcatcttagctcaaaggctcaggtgtttgaacatcctcacattcaagacgctgcttcgcagcttcctgatgatgagactttattttttggtgatactgggctatccaaaaatccaatcgagtttgtagaaggttggttcagtagttggaagagctctattgcctcttttttctttatcatagggttaatcattggactattcttggttctccgagttggtatttatctttgcattaaattaaagcacaccaagaaaagacagatttatacagacatagagatgaacccacttggactgtgggcgctttggtgggaagaagtagaggactgttatgaaagagaagatgttcaaaagaaaacattcacaaaatgggtaaatgcacaattttctaagtttgggaagcagcatattgagaacctcttcagtgacctacaggatgggaggcgcctcctagacctcctcgaaggcctgacagggcaaaaactgccaaaagaaaaaggatccacaagagttcatgccctgaacaatgtcaacaaggcactgcgggttttgcagaacaataatgttgatttagtgaatattggaagtactgacatcgtagatggaaatcataaactgactcttggtttgatttggaatataatcctccactggcaggtcaaaaatgtaatgaaaaatatcatggctggattgcaacaaaccaacagtgaaaagattctcctgagctgggtccgacaatcaactcgtaattatccacaggttaatgtaatcaacttcaccaccagctggtctgatggcctggctttgaatgctctcatccatagtcataggccagacctatttgactggaatagtgtggtttgccagcagtcagccacacaacgactggaacatgcattcaacatcgccagatatcaattaggcatagagaaactactcgatcctgaagatgttgataccacctatccagataagaagtccatcttaatgtacatcacatcactcttccaagttttgcctcaacaagtgagcattgaagccatccaggaagtggaaatgttgccaaggccacctaaagtgactaaagaagaacattttcagttacatcatcaaatgcactattctcaacagatcacggtcagtctagcacagggatatgagagaacttcttcccctaagcctcgattcaagagctatgcctacacacaggctgcttatgtcaccacctctgaccctacacggagcccatttccttcacagcatttggaagctcctgaagacaagtcatttggcagttcattgatggagagtgaagtaaacctggaccgttatcaaacagctttagaagaagtattatcgtggcttctttctgctgaggacacattgcaagcacaaggagagatttctaatgatgtggaagtggtgaaagaccagtttcatactcatgaggggtacatgatggatttgacagcccatcagggccgggttggtaatattctacaattgggaagtaagctgattggaacaggaaaattatcagaagatgaagaaactgaagtacaagagcagatgaatctcctaaattcaagatgggaatgcctcagggtagctagcatggaaaaacaaagcaatttacatagagttttaatggatctccagaatcagaaactgaaagagttgaatgactggctaacaaaaacagaagaaagaacaaggaaaatggaggaagagcctcttggacctgatcttgaagacctaaaacgccaagtacaacaacataaggtgcttcaagaagatctagaacaagaacaagtcagggtcaattctctcactcacatggtggtggtagttgatgaatctagtggagatcacgcaactgctgctttggaagaacaacttaaggtattgggagatcgatgggcaaacatctgtagatggacagaagaccgctgggttcttttacaagacatccttctcaaatggcaacgtcttactgaagaacagtgcctttttagtgcatggctttcagaaaaagaagatgcagtgaacaagattcacacaactggctttaaagatcaaaatgaaatgttatcaagtcttcaaaaactggccgttttaaaagcggatctagaaaagaaaaagcaatccatgggcaaactgtattcactcaaacaagatcttctttcaacactgaagaataagtcagtgacccagaagacggaagcatggctggataactttgcccggtgttgggataatttagtccaaaaacttgaaaagagtacagcacagatttcacaggctgtcaccaccactcagccatcactaacacagacaactgtaatggaaacagtaactacggtgaccacaagggaacagatcctggtaaagcatgctcaagaggaacttccaccaccacctccccaaaagaagaggcagattactgtggattctgaaattaggaaaaggttggatgttgatataactgaacttcacagctggattactcgctcagaagctgtgttgcagagtcctgaatttgcaatctttcggaaggaaggcaacttctcagacttaaaagaaaaagtcaatgccatagagcgagaaaaagctgagaagttcagaaaactgcaagatgccagcagatcagctcaggccctggtggaacagatggtgaatgagggtgttaatgcagatagcatcaaacaagcctcagaacaactgaacagccggtggatcgaattctgccagttgctaagtgagagacttaactggctggagtatcagaacaacatcatcgctttctataatcagctacaacaattggagcagatgacaactactgctgaaaactggttgaaaatccaacccaccaccccatcagagccaacagcaattaaaagtcagttaaaaatttgtaaggatgaagtcaaccggctatcaggtcttcaacctcaaattgaacgattaaaaattcaaagcatagccctgaaagagaaaggacaaggacccatgttcctggatgcagactttgtggcctttacaaatcattttaagcaagtcttttctgatgtgcaggccagagagaaagagctacagacaatttttgacactttgccaccaatgcgctatcaggagaccatgagtgccatcaggacatgggtccagcagtcagaaaccaaactctccatacctcaacttagtgtcaccgactatgaaatcatggagcagagactcggggaattgcaggctttacaaagttctctgcaagagcaacaaagtggcctatactatctcagcaccactgtgaaagagatgtcgaagaaagcgccctctgaaattagccggaaatatcaatcagaatttgaagaaattgagggacgctggaagaagctctcctcccagctggttgagcattgtcaaaagctagaggagcaaatgaataaactccgaaaaattcagaatcacatacaaaccctgaagaaatggatggctgaagttgatgtttttctgaaggaggaatggcctgcccttggggattcagaaattctaaaaaagcagctgaaacagtgcagacttttagtcagtgatattcagacaattcagcccagtctaaacagtgtcaatgaaggtgggcagaagataaagaatgaagcagagccagagtttgcttcgagacttgagacagaactcaaagaacttaacactcagtgggatcacatgtgccaacaggtctatgccagaaaggaggccttgaagggaggtttggagaaaactgtaagcctccagaaagatctatcagagatgcacgaatggatgacacaagctgaagaagagtatcttgagagagattttgaatataaaactccagatgaattacagaaagcagttgaagagatgaagagagctaaagaagaggcccaacaaaaagaagcgaaagtgaaactccttactgagtctgtaaatagtgtcatagctcaagctccacctgtagcacaagaggccttaaaaaaggaacttgaaactctaaccaccaactaccagtggctctgcactaggctgaatgggaaatgcaagactttggaagaagtttgggcatgttggcatgagttattgtcatacttggagaaagcaaacaagtggctaaatgaagtagaatttaaacttaaaaccactgaaaacattcctggcggagctgaggaaatctctgaggtgctagattcacttgaaaatttgatgcgacattcagaggataacccaaatcagattcgcatattggcacagaccctaacagatggcggagtcatggatgagctaatcaatgaggaacttgagacatttaattctcgttggagggaactacatgaagaggctgtaaggaggcaaaagttgcttgaacagagcatccagtctgcccaggagactgaaaaatccttacacttaatccaggagtccctcacattcattgacaagcagttggcagcttatattgcagacaaggtggacgcagctcaaatgcctcaggaagcccagaaaatccaatctgatttgacaagtcatgagatcagtttagaagaaatgaagaaacataatcaggggaaggaggctgcccaaagagtcctgtctcagattgatgttgcacagaaaaaattacaagatgtctccatgaagtttcgattattccagaaaccagccaattttgagctgcgtctacaagaaagtaagatgattttagatgaagtgaagatgcacttgcctgcattggaaacaaagagtgtggaacaggaagtagtacagtcacagctaaatcattgtgtgaacttgtataaaagtctgagtgaagtgaagtctgaagtggaaatggtgataaagactggacgtcagattgtacagaaaaagcagacggaaaatcccaaagaacttgatgaaagagtaacagctttgaaattgcattataatgagctgggagcaaaggtaacagaaagaaagcaacagttggagaaatgcttgaaattgtcccgtaagatgcgaaaggaaatgaatgtcttgacagaatggctggcagctacagatatggaattgacaaagagatcagcagttgaaggaatgcctagtaatttggattctgaagttgcctggggaaaggctactcaaaaagagattgagaaacagaaggtgcacctgaagagtatcacagaggtaggagaggccttgaaaacagttttgggcaagaaggagacgttggtggaagataaactcagtcttctgaatagtaactggatagctgtcacctcccgagcagaagagtggttaaatcttttgttggaataccagaaacacatggaaacttttgaccagaatgtggaccacatcacaaagtggatcattcaggctgacacacttttggatgaatcagagaaaaagaaaccccagcaaaaagaagacgtgcttaagcgtttaaaggcagaactgaatgacatacgcccaaaggtggactctacacgtgaccaagcagcaaacttgatggcaaaccgcggtgaccactgcaggaaattagtagagccccaaatctcagagctcaaccatcgatttgcagccatttcacacagaattaagactggaaaggcctccattcctttgaaggaattggagcagtttaactcagatatacaaaaattgcttgaaccactggaggctgaaattcagcagggggtgaatctgaaagaggaagacttcaataaagatatgaatgaagacaatgagggtactgtaaaagaattgttgcaaagaggagacaacttacaacaaagaatcacagatgagagaaagagagaggaaataaagataaaacagcagctgttacagacaaaacataatgctctcaaggatttgaggtctcaaagaagaaaaaaggctctagaaatttctcatcagtggtatcagtacaagaggcaggctgatgatctcctgaaatgcttggatgacattgaaaaaaaattagccagcctacctgagcccagagatgaaaggaaaataaaggaaattgatcgggaattgcagaagaagaaagaggagctgaatgcagtgcgtaggcaagctgagggcttgtctgaggatggggccgcaatggcagtggagccaactcagatccagctcagcaagcgctggcgggaaattgagagcaaatttgctcagtttcgaagactcaactttgcacaaattcacactgtccgtgaagaaacgatgatggtgatgactgaagacatgcctttggaaatttcttatgtgccttctacttatttgactgaaatcactcatgtctcacaagccctattagaagtggaacaacttctcaatgctcctgacctctgtgctaaggactttgaagatctctttaagcaagaggagtctctgaagaatataaaagatagtctacaacaaagctcaggtcggattgacattattcatagcaagaagacagcagcattgcaaagtgcaacgcctgtggaaagggtgaagctacaggaagctctctcccagcttgatttccaatgggaaaaagttaacaaaatgtacaaggaccgacaagggcgatttgacagatctgttgagaaatggcggcgttttcattatgatataaagatatttaatcagtggctaacagaagctgaacagtttctcagaaagacacaaattcctgagaattgggaacatgctaaatacaaatggtatcttaaggaactccaggatggcattgggcagcggcaaactgttgtcagaacattgaatgcaactggggaagaaataattcagcaatcctcaaaaacagatgccagtattctacaggaaaaattgggaagcctgaatctgcggtggcaggaggtctgcaaacagctgtcagacagaaaaaagaggctagaagaacaaaagaatatcttgtcagaatttcaaagagatttaaatgaatttgttttatggttggaggaagcagataacattgctagtatcccacttgaacctggaaaagagcagcaactaaaagaaaagcttgagcaagtcaagttactggtggaagagttgcccctgcgccagggaattctcaaacaattaaatgaaactggaggacccgtgcttgtaagtgctcccataagcccagaagagcaagataaacttgaaaataagctcaagcagacaaatctccagtggataaaggtttccagagctttacctgagaaacaaggagaaattgaagctcaaataaaagaccttgggcagcttgaaaaaaagcttgaagaccttgaagagcagttaaatcatctgctgctgtggttatctcctattaggaatcagttggaaatttataaccaaccaaaccaagaaggaccatttgacgttcaggaaactgaaatagcagttcaagctaaacaaccggatgtggaagagattttgtctaaagggcagcatttgtacaaggaaaaaccagccactcagccagtgaagaggaagttagaagatctgagctctgagtggaaggcggtaaaccgtttacttcaagagctgagggcaaagcagcctgacctagctcctggactgaccactattggagcctctcctactcagactgttactctggtgacacaacctgtggttactaaggaaactgccatctccaaactagaaatgccatcttccttgatgttggaggtacctgctctggcagatttcaaccgggcttggacagaacttaccgactggctttctctgcttgatcaagttataaaatcacagagggtgatggtgggtgaccttgaggatatcaacgagatgatcatcaagcagaaggcaacaatgcaggatttggaacagaggcgtccccagttggaagaactcattaccgctgcccaaaatttgaaaaacaagaccagcaatcaagaggctagaacaatcattacggatcgaattgaaagaattcagaatcagtgggatgaagtacaagaacaccttcagaaccggaggcaacagttgaatgaaatgttaaaggattcaacacaatggctggaagctaaggaagaagctgagcaggtcttaggacaggccagagccaagcttgagtcatggaaggagggtccctatacagtagatgcaatccaaaagaaaatcacagaaaccaagcagttggccaaagacctccgccagtggcagacaaatgtagatgtggcaaatgacttggccctgaaacttctccgggattattctgcagatgataccagaaaagtccacatgataacagagaatatcaatgcctcttggagaagcattcataaaagggtgagtgagcgagaggctgctttggaagaaactcatagattactgcaacagttccccctggacctggaaaagtttcttgcctggcttacagaagctgaaacaactgccaatgtcctacaggatgctacccgtaaggaaaggctcctagaagactccaagggagtaaaagagctgatgaaacaatggcaagacctccaaggtgaaattgaagctcacacagatgtttatcacaacctggatgaaaacagccaaaaaatcctgagatccctggaaggttccgatgatgcagtcctgttacaaagacgtttggataacatgaacttcaagtggagtgaacttcggaaaaagtctctcaacattaggtcccatttggaagccagttctgaccagtggaagcgtctgcacctttctctgcaggaacttctggtgtggctacagctgaaagatgatgaattaagccggcaggcacctattggaggcgactttccagcagttcagaagcagaacgatgtacatagggccttcaagagggaattgaaaactaaagaacctgtaatcatgagtactcttgagactgtacgaatatttctgacagagcagcctttggaaggactagagaaactctaccaggagcccagagagctgcctcctgaggagagagcccagaatgtcactcggcttctacgaaagcaggctgaggaggtcaatactgagtgggaaaaattgaacctgcactccgctgactggcagagaaaaatagatgagacccttgaaagactccaggaacttcaagaggccacggatgagctggacctcaagctgcgccaagctgaggtgatcaagggatcctggcagcccgtgggcgatctcctcattgactctctccaagatcacctcgagaaagtcaaggcacttcgaggagaaattgcgcctctgaaagagaacgtgagccacgtcaatgaccttgctcgccagcttaccactttgggcattcagctctcaccgtataacctcagcactctggaagacctgaacaccagatggaagcttctgcaggtggccgtcgaggaccgagtcaggcagctgcatgaagcccacagggactttggtccagcatctcagcactttctttccacgtctgtccagggtccctgggagagagccatctcgccaaacaaagtgccctactatatcaaccacgagactcaaacaacttgctgggaccatcccaaaatgacagagctctaccagtctttagctgacctgaataatgtcagattctcagcttataggactgccatgaaactccgaagactgcagaaggccctttgcttggatctcttgagcctgtcagctgcatgtgatgccttggaccagcacaacctcaagcaaaatgaccagcccatggatatcctgcagattattaattgtttgaccactatttatgaccgcctggagcaagagcacaacaatttggtcaacgtccctctctgcgtggatatgtgtctgaactggctgctgaatgtttatgatacgggacgaacagggaggatccgtgtcctgtcttttaaaactggcatcatttccctgtgtaaagcacatttggaagacaagtacagataccttttcaagcaagtggcaagttcaacaggattttgtgaccagcgcaggctgggcctccttctgcatgattctatccaaattccaagacagttgggtgaagttgcatcctttgggggcagtaacattgagccaagtgtccggagctgcttccaatttgctaataataagccagagatcgaagcggccctcttcctagactggatgagactggaaccccagtccatggtgtggctgcccgtcctgcacagagtggctgctgcagaaactgccaagcatcaggccaaatgtaacatctgcaaagagtgtccaatcattggattcaggtacaggagtctaaagcactttaattatgacatctgccaaagctgctttttttctggtcgagttgcaaaaggccataaaatgcactatcccatggtggaatattgcactccgactacatcaggagaagatgttcgagactttgccaaggtactaaaaaacaaatttcgaaccaaaaggtattttgcgaagcatccccgaatgggctacctgccagtgcagactgtcttagagggggacaacatggaaactcccgttactctgatcaacttctggccagtagattctgcgcctgcctcgtcccctcagctttcacacgatgatactcattcacgcattgaacattatgctagcaggctagcagaaatggaaaacagcaatggatcttatctaaatgatagcatctctcctaatgagagcatagatgatgaacatttgttaatccagcattactgccaaagtttgaaccaggactcccccctgagccagcctcgtagtcctgcccagatcttgatttccttagagagtgaggaaagaggggagctagagagaatcctagcagatcttgaggaagaaaacaggaatctgcaagcagaatatgaccgtctaaagcagcagcacgaacataaaggcctgtccccactgccgtcccctcctgaaatgatgcccacctctccccagagtccccgggatgctgagctcattgctgaggccaagctactgcgtcaacacaaaggccgcctggaagccaggatgcaaatcctggaagaccacaataaacagctggagtcacagttacacaggctaaggcagctgctggagcaaccccaggcagaggccaaagtgaatggcacaacggtgtcctctccttctacctctctacagaggtccgacagcagtcagcctatgctgctccgagtggttggcagtcaaacttcggactccatgggtgaggaagatcttctcagtcctccccaggacacaagcacagggttagaggaggtgatggagcaactcaacaactccttccctagttcaagaggaagaaatacccctggaaagccaatgagagaggacacaatgtag

SEQ ID NO: 2 - protein, 4197 aa, Artificial Sequence
  Amino Acid Sequence of Dystrophin-VSV-G Chimeric Protein with VSV-G at N-terminal
  CHAIN (1)..(4196)
MKCLLYLAFLFIGVNCKFTIVFPHNQKGNWKNVPSNYHYCPSSSDLNWHNDLIGTALQVKMPKSHKAIQADGWMCHASKWVTTCDFRWYGPKYITHSIRSFTPSVEQCKESIEQTKQGTWLNPGFPPQSCGYATVTDAEAAIVQVTPHHVLVDEYTGEWVDSQFINGKCSNDICPTVHNSTTWHSDYKVKGLCDSNLISTDITFFSEDGELSSLGKEGTGFRSNYFAYETGDKACKMQYCKHWGVRLPSGVWFEMADKDLFAAARFPECPEGSSISAPSQTSVDVSLIQDVERILDYSLCQETWSKIRAGLPISPVDLSYLAPKNPGTGPVFTIINGTLKYFETRYIRVDIAAPILSRMVGMISGTTTERELWDDWAPYEDVEIGPNGVLRTSLGYKFPLYMIGHGMLDSDLHLSSKAQVFEHPHIQDAASQLPDDETLFFGDTGLSKNPIEFVEGWFSSWKSSIASFFFIIGLIIGLFLVLRVGIYLCIKLKHTKKRQIYTDIEMNPLGLWALWWEEVEDCYEREDVQKKTFTKWVNAQFSKFGKQHIENLFSDLQDGRRLLDLLEGLTGQKLPKEKGSTRVHALNNVNKALRVLQNNNVDLVNIGSTDIVDGNHKLTLGLIWNIILHWQVKNVMKNIMAGLQQTNSEKILLSWVRQSTRNYPQVNVINFTTSWSDGLALNALIHSHRPDLFDWNSVVCQQSATQRLEHAFNIARYQLGIEKLLDPEDVDTTYPDKKSILMYITSLFQVLPQQVSIEAIQEVEMLPRPPKVTKEEHFQLHHQMHYSQQITVSLAQGYERTSSPKPRFKSYAYTQAAYVTTSDPTRSPFPSQHLEAPEDKSFGSSLMESEVNLDRYQTALEEVLSWLLSAEDTLQAQGEISNDVEVVKDQFHTHEGYMMDLTAHQGRVGNILQLGSKLIGTGKLSEDEETEVQEQMNLLNSRWECLRVASMEKQSNLHRVLMDLQNQKLKELNDWLTKTEERTRKMEEEPLGPDLEDLKRQVQQHKVLQEDLEQEQVRVNSLTHMVVVVDESSGDHATAALEEQLKVLGDRWANICRWTEDRWVLLQDILLKWQRLTEEQCLFSAWLSEKEDAVNKIHTTGFKDQNEMLSSLQKLAVLKADLEKKKQSMGKLYSLKQDLLSTLKNKSVTQKTEAWLDNFARCWDNLVQKLEKSTAQISQAVTTTQPSLTQTTVMETVTTVTTREQILVKHAQEELPPPPPQKKRQITVDSEIRKRLDVDITELHSWITRSEAVLQSPEFAIFRKEGNFSDLKEKVNAIEREKAEKFRKLQDASRSAQALVEQMVNEGVNADSIKQASEQLNSRWIEFCQLLSERLNWLEYQNNIIAFYNQLQQLEQMTTTAENWLKIQPTTPSEPTAIKSQLKICKDEVNRLSGLQPQIERLKIQSIALKEKGQGPMFLDADFVAFTNHFKQVFSDVQAREKELQTIFDTLPPMRYQETMSAIRTWVQQSETKLSIPQLSVTDYEIMEQRLGELQALQSSLQEQQSGLYYLSTTVKEMSKKAPSEISRKYQSEFEEIEGRWKKLSSQLVEHCQKLEEQMNKLRKIQNHIQTLKKWMAEVDVFLKEEWPALGDSEILKKQLKQCRLLVSDIQTIQPSLNSVNEGGQKIKNEAEPEFASRLETELKELNTQWDHMCQQVYARKEALKGGLEKTVSLQKDLSEMHEWMTQAEEEYLERDFEYKTPDELQKAVEEMKRAKEEAQQKEAKVKLLTESVNSVIAQAPPVAQEALKKELETLTTNYQWLCTRLNGKCKTLEEVWACWHELLSYLEKANKWLNEVEFKLKTTENIPGGAEEISEVLDSLENLMRHSEDNPNQIRILAQTLTDGGVMDELINEELETFNSRWRELHEEAVRRQKLLEQSIQSAQETEKSLHLIQESLTFIDKQLAAYIADKVDAAQMPQEAQKIQSDLTSHEISLEEMKKHNQGKEAAQRVLSQIDVAQKKLQDVSMKFRLFQKPANFELRLQESKMILDEVKMHLPALETKSVEQEVVQSQLNHCVNLYKSLSEVKSEVEMVIKTGRQIVQKKQTENPKELDERVTALKLHYNELGAKVTERKQQLEKCLKLSRKMRKEMNVLTEWLAATDMELTKRSAVEGMPSNLDSEVAWGKATQKEIEKQKVHLKSITEVGEALKTVLGKKETLVEDKLSLLNSNWIAVTSRAEEWLNLLLEYQKHMETFDQNVDHITKWIIQADTLLDESEKKKPQQKEDVLKRLKAELNDIRPKVDSTRDQAANLMANRGDHCRKLVEPQISELNHRFAAISHRIKTGKASIPLKELEQFNSDIQKLLEPLEAEIQQGVNLKEEDFNKDMNEDNEGTVKELLQRGDNLQQRITDERKREEIKIKQQLLQTKHNALKDLRSQRRKKALEISHQWYQYKRQADDLLKCLDDIEKKLASLPEPRDERKIKEIDRELQKKKEELNAVRRQAEGLSEDGAAMAVEPTQIQLSKRWREIESKFAQFRRLNFAQIHTVREETMMVMTEDMPLEISYVPSTYLTEITHVSQALLEVEQLLNAPDLCAKDFEDLFKQEESLKNIKDSLQQSSGRIDIIHSKKTAALQSATPVERVKLQEALSQLDFQWEKVNKMYKDRQGRFDRSVEKWRRFHYDIKIFNQWLTEAEQFLRKTQIPENWEHAKYKWYLKELQDGIGQRQTVVRTLNATGEEIIQQSSKTDASILQEKLGSLNLRWQEVCKQLSDRKKRLEEQKNILSEFQRDLNEFVLWLEEADNIASIPLEPGKEQQLKEKLEQVKLLVEELPLRQGILKQLNETGGPVLVSAPISPEEQDKLENKLKQTNLQWIKVSRALPEKQGEIEAQIKDLGQLEKKLEDLEEQLNHLLLWLSPIRNQLEIYNQPNQEGPFDVQETEIAVQAKQPDVEEILSKGQHLYKEKPATQPVKRKLEDLSSEWKAVNRLLQELRAKQPDLAPGLTTIGASPTQTVTLVTQPVVTKETAISKLEMPSSLMLEVPALADFNRAWTELTDWLSLLDQVIKSQRVMVGDLEDINEMIIKQKATMQDLEQRRPQLEELITAAQNLKNKTSNQEARTIITDRIERIQNQWDEVQEHLQNRRQQLNEMLKDSTQWLEAKEEAEQVLGQARAKLESWKEGPYTVDAIQKKITETKQLAKDLRQWQTNVDVANDLALKLLRDYSADDTRKVHMITENINASWRSIHKRVSEREAALEETHRLLQQFPLDLEKFLAWLTEAETTANVLQDATRKERLLEDSKGVKELMKQWQDLQGEIEAHTDVYHNLDENSQKILRSLEGSDDAVLLQRRLDNMNFKWSELRKKSLNIRSHLEASSDQWKRLHLSLQELLVWLQLKDDELSRQAPIGGDFPAVQKQNDVHRAFKRELKTKEPVIMSTLETVRIFLTEQPLEGLEKLYQEPRELPPEERAQNVTRLLRKQAEEVNTEWEKLNLHSADWQRKIDETLERLQELQEATDELDLKLRQAEVIKGSWQPVGDLLIDSLQDHLEKVKALRGEIAPLKENVSHVNDLARQLTTLGIQLSPYNLSTLEDLNTRWKLLQVAVEDRVRQLHEAHRDFGPASQHFLSTSVQGPWERAISPNKVPYYINHETQTTCWDHPKMTELYQSLADLNNVRFSAYRTAMKLRRLQKALCLDLLSLSAACDALDQHNLKQNDQPMDILQIINCLTTIYDRLEQEHNNLVNVPLCVDMCLNWLLNVYDTGRTGRIRVLSFKTGIISLCKAHLEDKYRYLFKQVASSTGFCDQRRLGLLLHDSIQIPRQLGEVASFGGSNIEPSVRSCFQFANNKPEIEAALFLDWMRLEPQSMVWLPVLHRVAAAETAKHQAKCNICKECPIIGFRYRSLKHFNYDICQSCFFSGRVAKGHKMHYPMVEYCTPTTSGEDVRDFAKVLKNKFRTKRYFAKHPRMGYLPVQTVLEGDNMETPVTLINFWPVDSAPASSPQLSHDDTHSRIEHYASRLAEMENSNGSYLNDSISPNESIDDEHLLIQHYCQSLNQDSPLSQPRSPAQILISLESEERGELERILADLEEENRNLQAEYDRLKQQHEHKGLSPLPSPPEMMPTSPQSPRDAELIAEAKLLRQHKGRLEARMQILEDHNKQLESQLHRLRQLLEQPQAEAKVNGTTVSSPSTSLQRSDSSQPMLLRVVGSQTSDSMGEEDLLSPPQDTSTGLEEVMEQLNNSFPSSRGRNTPGKPMREDTM

SEQ ID NO: 3 - DNA, 7488 bp, Artificial Sequence
  Nucleotide Sequence of Proposed Dystrophin (truncated)-VSV-G Chimeric Protein with VSV-G at N-terminal
  misc_feature (1)..(7488)
atgaagtgccttttgtacttagcttttttattcatcggggtgaattgcaagttcaccatagtttttccacacaaccaaaaaggaaactggaaaaatgttccttccaattaccattattgcccgtcaagctcagatttaaattggcataatgacttaataggcacagccttacaagtcaaaatgcccaagagtcacaaggctattcaagcagacggttggatgtgtcatgcttccaaatgggtcactacttgtgatttccgctggtacggaccgaagtatataacacattccatccgatccttcactccatctgtagaacaatgcaaggaaagcattgaacaaacgaaacaaggaacttggctgaatccaggcttccctcctcaaagttgtggatatgcaactgtgacggatgctgaagcagcgattgtccaggtgactcctcaccatgtgcttgttgatgaatacacaggagaatgggttgattcacagttcatcaacggaaaatgcagcaatgacatatgccccactgtccataactccacaacctggcattccgactataaggtcaaagggctatgtgattctaacctcatttccacggacatcaccttcttctcagaggacggagagctatcatccctaggaaaggagggcacagggttcagaagtaactactttgcttatgaaactggagacaaggcctgcaaaatgcagtactgcaagcattggggagtcagactcccatcaggtgtctggttcgagatggctgataaggatctctttgctgcagccagattccctgaatgcccagaagggtcaagtatctctgctccatctcagacctcagtggatgtaagtctcattcaggacgttgagaggatcttggattattccctctgccaagaaacctggagcaaaatcagagcgggtcttcccatctctccagtggatctcagctatcttgctcctaaaaacccaggaaccggtcctgtctttaccataatcaatggtaccctaaaatactttgagaccagatacatcagagtcgatattgctgctccaatcctctcaagaatggtcggaatgatcagtggaactaccacagaaagggaactgtgggatgactgggctccatatgaagacgtggaaattggacccaatggagttctgaggaccagtttaggatataagtttcctttatatatgattggacatggtatgttggactccgatcttcatcttagctcaaaggctcaggtgtttgaacatcctcacattcaagacgctgcttcgcagcttcctgatgatgagactttattttttggtgatactgggctatccaaaaatccaatcgagtttgtagaaggttggttcagtagttggaagagctctattgcctcttttttctttatcatagggttaatcattggactattcttggttctccgagttggtatttatctttgcattaaattaaagcacaccaagaaaagacagatttatacagacatagagatgaacccacttggactgtgggcgctttggtgggaagaagtagaggactgttatgaaagagaagatgttcaaaagaaaacattcacaaaatgggtaaatgcacaattttctaagtttgggaagcagcatattgagaacctcttcagtgacctacaggatgggaggcgcctcctagacctcctcgaaggcctgacagggcaaaaactgccaaaagaaaaaggatccacaagagttcatgccctgaacaatgtcaacaaggcactgcgggttttgcagaacaataatgttgatttagtgaatattggaagtactgacatcgtagatggaaatcataaactgactcttggtttgatttggaatataatcctccactggcaggtcaaaaatgtaatgaaaaatatcatggctggattgcaacaaaccaacagtgaaaagattctcctgagctgggtccgacaatcaactcgtaattatccacaggttaatgtaatcaacttcaccaccagctggtctgatggcctggctttgaatgctctcatccatagtcataggccagacctatttgactggaatagtgtggtttgccagcagtcagccacacaacgactggaacatgcattcaacatcgccagatatcaattaggcatagagaaactactcgatcctgaagatgttgataccacctatccagataagaagtccatcttaatgtacatcacatcactcttccaagttttgcctcaacaagtgagcattgaagccatccaggaagtggaaatgttgccaaggccacctaaagtgactaaagaagaacattttcagttacatcatcaaatgcactattctcaacagatcacggtcagtctagcacagggatatgagagaacttcttcccctaagcctcgattcaagagctatgcctacacacaggctgcttatgtcaccacctctgaccctacacggagcccatttccttcacagcatttggaagctcctgaagacaagtcatttggcagttcattgatggagagtgaagtaaacctggaccgttatcaaacagctttagaagaagtattatcgtggcttctttctgctgaggacacattgcaagcacaaggagagatttctaatgatgtggaagtggtgaaagaccagtttcatactcatgaggggtacatgatggatttgacagcccatcagggccgggttggtaatattctacaattgggaagtaagctgattggaacaggaaaattatcagaagatgaagaaactgaagtacaagagcagatgaatctcctaaattcaagatgggaatgcctcagggtagctagcatggaaaaacaaagcaatttacatagagttttaatggatctccagaatcagaaactgaaagagttgaatgactggctaacaaaaacagaagaaagaacaaggaaaatggaggaagagcctcttggacctgatcttgaagacctaaaacgccaagtacaacaacataaggtgcttcaagaagatctagaacaagaacaagtcagggtcaattctctcactcacatggtggtggtagttgatgaatctagtggagatcacgcaactgctgctttggaagaacaacttaaggtattgggagatcgatgggcaaacatctgtagatggacagaagaccgctgggttcttttacaagacatccttctcaaatggcaacgtcttactgaagaacagtgcctttttagtgcatggctttcagaaaaagaagatgcagtgaacaagattcacacaactggctttaaagatcaaaatgaaatgttatcaagtcttcaaaaactggccgttttaaaagcggatctagaaaagaaaaagcaatccatgggcaaactgtattcactcaaacaagatcttctttcaacactgaagaataagtcagtgacccagaagacggaagcatggctggataactttgcccggtgttgggataatttagtccaaaaacttgaaaagagtacagcacaggaaactgaaatagcagttcaagctaaacaaccggatgtggaagagattttgtctaaagggcagcatttgtacaaggaaaaaccagccactcagccagtgaagaggaagttagaagatctgagctctgagtggaaggcggtaaaccgtttacttcaagagctgagggcaaagcagcctgacctagctcctggactgaccactattggagcctctcctactcagactgttactctggtgacacaacctgtggttactaaggaaactgccatctccaaactagaaatgccatcttccttgatgttggaggtacctgctctggcagatttcaaccgggcttggacagaacttaccgactggctttctctgcttgatcaagttataaaatcacagagggtgatggtgggtgaccttgaggatatcaacgagatgatcatcaagcagaaggcaacaatgcaggatttggaacagaggcgtccccagttggaagaactcattaccgctgcccaaaatttgaaaaacaagaccagcaatcaagaggctagaacaatcattacggatcgaattgaaagaattcagaatcagtgggatgaagtacaagaacaccttcagaaccggaggcaacagttgaatgaaatgttaaaggattcaacacaatggctggaagctaaggaagaagctgagcaggtcttaggacaggccagagccaagcttgagtcatggaaggagggtccctatacagtagatgcaatccaaaagaaaatcacagaaaccaagcagttggccaaagacctccgccagtggcagacaaatgtagatgtggcaaatgacttggccctgaaacttctccgggattattctgcagatgataccagaaaagtccacatgataacagagaatatcaatgcctcttggagaagcattcataaaagggtgagtgagcgagaggctgctttggaagaaactcatagattactgcaacagttccccctggacctggaaaagtttcttgcctggcttacagaagctgaaacaactgccaatgtcctacaggatgctacccgtaaggaaaggctcctagaagactccaagggagtaaaagagctgatgaaacaatggcaagacctccaaggtgaaattgaagctcacacagatgtttatcacaacctggatgaaaacagccaaaaaatcctgagatccctggaaggttccgatgatgcagtcctgttacaaagacgtttggataacatgaacttcaagtggagtgaacttcggaaaaagtctctcaacattaggtcccatttggaagccagttctgaccagtggaagcgtctgcacctttctctgcaggaacttctggtgtggctacagctgaaagatgatgaattaagccggcaggcacctattggaggcgactttccagcagttcagaagcagaacgatgtacatagggccttcaagagggaattgaaaactaaagaacctgtaatcatgagtactcttgagactgtacgaatatttctgacagagcagcctttggaaggactagagaaactctaccaggagcccagagagctgcctcctgaggagagagcccagaatgtcactcggcttctacgaaagcaggctgaggaggtcaatactgagtgggaaaaattgaacctgcactccgctgactggcagagaaaaatagatgagacccttgaaagactccaggaacttcaagaggccacggatgagctggacctcaagctgcgccaagctgaggtgatcaagggatcctggcagcccgtgggcgatctcctcattgactctctccaagatcacctcgagaaagtcaaggcacttcgaggagaaattgcgcctctgaaagagaacgtgagccacgtcaatgaccttgctcgccagcttaccactttgggcattcagctctcaccgtataacctcagcactctggaagacctgaacaccagatggaagcttctgcaggtggccgtcgaggaccgagtcaggcagctgcatgaagcccacagggactttggtccagcatctcagcactttctttccacgtctgtccagggtccctgggagagagccatctcgccaaacaaagtgccctactatatcaaccacgagactcaaacaacttgctgggaccatcccaaaatgacagagctctaccagtctttagctgacctgaataatgtcagattctcagcttataggactgccatgaaactccgaagactgcagaaggccctttgcttggatctcttgagcctgtcagctgcatgtgatgccttggaccagcacaacctcaagcaaaatgaccagcccatggatatcctgcagattattaattgtttgaccactatttatgaccgcctggagcaagagcacaacaatttggtcaacgtccctctctgcgtggatatgtgtctgaactggctgctgaatgtttatgatacgggacgaacagggaggatccgtgtcctgtcttttaaaactggcatcatttccctgtgtaaagcacatttggaagacaagtacagataccttttcaagcaagtggcaagttcaacaggattttgtgaccagcgcaggctgggcctccttctgcatgattctatccaaattccaagacagttgggtgaagttgcatcctttgggggcagtaacattgagccaagtgtccggagctgcttccaatttgctaataataagccagagatcgaagcggccctcttcctagactggatgagactggaaccccagtccatggtgtggctgcccgtcctgcacagagtggctgctgcagaaactgccaagcatcaggccaaatgtaacatctgcaaagagtgtccaatcattggattcaggtacaggagtctaaagcactttaattatgacatctgccaaagctgctttttttctggtcgagttgcaaaaggccataaaatgcactatcccatggtggaatattgcactccgactacatcaggagaagatgttcgagactttgccaaggtactaaaaaacaaatttcgaaccaaaaggtattttgcgaagcatccccgaatgggctacctgccagtgcagactgtcttagagggggacaacatggaaactcccgttactctgatcaacttctggccagtagattctgcgcctgcctcgtcccctcagctttcacacgatgatactcattcacgcattgaacattatgctagcaggctagcagaaatggaaaacagcaatggatcttatctaaatgatagcatctctcctaatgagagcatagatgatgaacatttgttaatccagcattactgccaaagtttgaaccaggactcccccctgagccagcctcgtagtcctgcccagatcttgatttccttagagagtgaggaaagaggggagctagagagaatcctagcagatcttgaggaagaaaacaggaatctgcaagcagaatatgaccgtctaaagcagcagcacgaacataaaggcctgtccccactgccgtcccctcctgaaatgatgcccacctctccccagagtccccgggatgctgagctcattgctgaggccaagctactgcgtcaacacaaaggccgcctggaagccaggatgcaaatcctggaagaccacaataaacagctggagtcacagttacacaggctaaggcagctgctggagcaaccccaggcagaggccaaagtgaatggcacaacggtgtcctctccttctacctctctacagaggtccgacagcagtcagcctatgctgctccgagtggttggcagtcaaacttcggactccatgggtgaggaagatcttctcagtcctccccaggacacaagcacagggttagaggaggtgatggagcaactcaacaactccttccctagttcaagaggaagaaatacccctggaaagccaatgagagaggacacaatgtag

SEQ ID NO: 4 - protein, 2495 aa, Artificial Sequence
  Amino Acid Sequence of Proposed Dystrophin (truncated)-VSV-G Chimeric Protein with VSV-G at N-terminal
MKCLLYLAFLFIGVNCKFTIVFPHNQKGNWKNVPSNYHYCPSSSDLNWHNDLIGTALQVKMPKSHKAIQADGWMCHASKWVTTCDFRWYGPKYITHSIRSFTPSVEQCKESIEQTKQGTWLNPGFPPQSCGYATVTDAEAAIVQVTPHHVLVDEYTGEWVDSQFINGKCSNDICPTVHNSTTWHSDYKVKGLCDSNLISTDITFFSEDGELSSLGKEGTGFRSNYFAYETGDKACKMQYCKHWGVRLPSGVWFEMADKDLFAAARFPECPEGSSISAPSQTSVDVSLIQDVERILDYSLCQETWSKIRAGLPISPVDLSYLAPKNPGTGPVFTIINGTLKYFETRYIRVDIAAPILSRMVGMISGTTTERELWDDWAPYEDVEIGPNGVLRTSLGYKFPLYMIGHGMLDSDLHLSSKAQVFEHPHIQDAASQLPDDETLFFGDTGLSKNPIEFVEGWFSSWKSSIASFFFIIGLIIGLFLVLRVGIYLCIKLKHTKKRQIYTDIEMNPLGLWALWWEEVEDCYEREDVQKKTFTKWVNAQFSKFGKQHIENLFSDLQDGRRLLDLLEGLTGQKLPKEKGSTRVHALNNVNKALRVLQNNNVDLVNIGSTDIVDGNHKLTLGLIWNIILHWQVKNVMKNIMAGLQQTNSEKILLSWVRQSTRNYPQVNVINFTTSWSDGLALNALIHSHRPDLFDWNSVVCQQSATQRLEHAFNIARYQLGIEKLLDPEDVDTTYPDKKSILMYITSLFQVLPQQVSIEAIQEVEMLPRPPKVTKEEHFQLHHQMHYSQQITVSLAQGYERTSSPKPRFKSYAYTQAAYVTTSDPTRSPFPSQHLEAPEDKSFGSSLMESEVNLDRYQTALEEVLSWLLSAEDTLQAQGEISNDVEVVKDQFHTHEGYMMDLTAHQGRVGNILQLGSKLIGTGKLSEDEETEVQEQMNLLNSRWECLRVASMEKQSNLHRVLMDLQNQKLKELNDWLTKTEERTRKMEEEPLGPDLEDLKRQVQQHKVLQEDLEQEQVRVNSLTHMVVVVDESSGDHATAALEEQLKVLGDRWANICRWTEDRWVLLQDILLKWQRLTEEQCLFSAWLSEKEDAVNKIHTTGFKDQNEMLSSLQKLAVLKADLEKKKQSMGKLYSLKQDLLSTLKNKSVTQKTEAWLDNFARCWDNLVQKLEKSTAQETEIAVQAKQPDVEEILSKGQHLYKEKPATQPVKRKLEDLSSEWKAVNRLLQELRAKQPDLAPGLTTIGASPTQTVTLVTQPVVTKETAISKLEMPSSLMLEVPALADFNRAWTELTDWLSLLDQVIKSQRVMVGDLEDINEMIIKQKATMQDLEQRRPQLEELITAAQNLKNKTSNQEARTIITDRIERIQNQWDEVQEHLQNRRQQLNEMLKDSTQWLEAKEEAEQVLGQARAKLESWKEGPYTVDAIQKKITETKQLAKDLRQWQTNVDVANDLALKLLRDYSADDTRKVHMITENINASWRSIHKRVSEREAALEETHRLLQQFPLDLEKFLAWLTEAETTANVLQDATRKERLLEDSKGVKELMKQWQDLQGEIEAHTDVYHNLDENSQKILRSLEGSDDAVLLQRRLDNMNFKWSELRKKSLNIRSHLEASSDQWKRLHLSLQELLVWLQLKDDELSRQAPIGGDFPAVQKQNDVHRAFKRELKTKEPVIMSTLETVRIFLTEQPLEGLEKLYQEPRELPPEERAQNVTRLLRKQAEEVNTEWEKLNLHSADWQRKIDETLERLQELQEATDELDLKLRQAEVIKGSWQPVGDLLIDSLQDHLEKVKALRGEIAPLKENVSHVNDLARQLTTLGIQLSPYNLSTLEDLNTRWKLLQVAVEDRVRQLHEAHRDFGPASQHFLSTSVQGPWERAISPNKVPYYINHETQTTCWDHPKMTELYQSLADLNNVRFSAYRTAMKLRRLQKALCLDLLSLSAACDALDQHNLKQNDQPMDILQIINCLTTIYDRLEQEHNNLVNVPLCVDMCLNWLLNVYDTGRTGRIRVLSFKTGIISLCKAHLEDKYRYLFKQVASSTGFCDQRRLGLLLHDSIQIPRQLGEVASFGGSNIEPSVRSCFQFANNKPEIEAALFLDWMRLEPQSMVWLPVLHRVAAAETAKHQAKCNICKECPIIGFRYRSLKHFNYDICQSCFFSGRVAKGHKMHYPMVEYCTPTTSGEDVRDFAKVLKNKFRTKRYFAKHPRMGYLPVQTVLEGDNMETPVTLINFWPVDSAPASSPQLSHDDTHSRIEHYASRLAEMENSNGSYLNDSISPNESIDDEHLLIQHYCQSLNQDSPLSQPRSPAQILISLESEERGELERILADLEEENRNLQAEYDRLKQQHEHKGLSPLPSPPEMMPTSPQSPRDAELIAEAKLLRQHKGRLEARMQILEDHNKQLESQLHRLRQLLEQPQAEAKVNGTTVSSPSTSLQRSDSSQPMLLRVVGSQTSDSMGEEDLLSPPQDTSTGLEEVMEQLNNSFPSSRGRNTPGKPMREDTM

SEQ ID NO: 5 - DNA, 12588 bp, Artificial Sequence
  Nucleotide Sequence of Proposed Dystrophin-VSV-G Chimeric Protein with VSV-G at C-terminal
  misc_feature (1)..(12588)
atgctttggtgggaagaagtagaggactgttatgaaagagaagatgttcaaaagaaaacattcacaaaatgggtaaatgcacaattttctaagtttgggaagcagcatattgagaacctcttcagtgacctacaggatgggaggcgcctcctagacctcctcgaaggcctgacagggcaaaaactgccaaaagaaaaaggatccacaagagttcatgccctgaacaatgtcaacaaggcactgcgggttttgcagaacaataatgttgatttagtgaatattggaagtactgacatcgtagatggaaatcataaactgactcttggtttgatttggaatataatcctccactggcaggtcaaaaatgtaatgaaaaatatcatggctggattgcaacaaaccaacagtgaaaagattctcctgagctgggtccgacaatcaactcgtaattatccacaggttaatgtaatcaacttcaccaccagctggtctgatggcctggctttgaatgctctcatccatagtcataggccagacctatttgactggaatagtgtggtttgccagcagtcagccacacaacgactggaacatgcattcaacatcgccagatatcaattaggcatagagaaactactcgatcctgaagatgttgataccacctatccagataagaagtccatcttaatgtacatcacatcactcttccaagttttgcctcaacaagtgagcattgaagccatccaggaagtggaaatgttgccaaggccacctaaagtgactaaagaagaacattttcagttacatcatcaaatgcactattctcaacagatcacggtcagtctagcacagggatatgagagaacttcttcccctaagcctcgattcaagagctatgcctacacacaggctgcttatgtcaccacctctgaccctacacggagcccatttccttcacagcatttggaagctcctgaagacaagtcatttggcagttcattgatggagagtgaagtaaacctggaccgttatcaaacagctttagaagaagtattatcgtggcttctttctgctgaggacacattgcaagcacaaggagagatttctaatgatgtggaagtggtgaaagaccagtttcatactcatgaggggtacatgatggatttgacagcccatcagggccgggttggtaatattctacaattgggaagtaagctgattggaacaggaaaattatcagaagatgaagaaactgaagtacaagagcagatgaatctcctaaattcaagatgggaatgcctcagggtagctagcatggaaaaacaaagcaatttacatagagttttaatggatctccagaatcagaaactgaaagagttgaatgactggctaacaaaaacagaagaaagaacaaggaaaatggaggaagagcctcttggacctgatcttgaagacctaaaacgccaagtacaacaacataaggtgcttcaagaagatctagaacaagaacaagtcagggtcaattctctcactcacatggtggtggtagttgatgaatctagtggagatcacgcaactgctgctttggaagaacaacttaaggtattgggagatcgatgggcaaacatctgtagatggacagaagaccgctgggttcttttacaagacatccttctcaaatggcaacgtcttactgaagaacagtgcctttttagtgcatggctttcagaaaaagaagatgcagtgaacaagattcacacaactggctttaaagatcaaaatgaaatgttatcaagtcttcaaaaactggccgttttaaaagcggatctagaaaagaaaaagcaatccatgggcaaactgtattcactcaaacaagatcttctttcaacactgaagaataagtcagtgacccagaagacggaagcatggctggataactttgcccggtgttgggataatttagtccaaaaacttgaaaagagtacagcacagatttcacaggctgtcaccaccactcagccatcactaacacagacaactgtaatggaaacagtaactacggtgaccacaagggaacagatcctggtaaagcatgctcaagaggaacttccaccaccacctccccaaaagaagaggcagattactgtggattctgaaattaggaaaaggttggatgttgatataactgaacttcacagctggattactcgctcagaagctgtgttgcagagtcctgaatttgcaatctttcggaaggaaggcaacttctcagacttaaaagaaaaagtcaatgccatagagcgagaaaaagctgagaagttcagaaaactgcaagatgccagcagatcagctcaggccctggtggaacagatggtgaatgagggtgttaatgcagatagcatcaaacaagcctcagaacaactgaacagccggtggatcgaattctgccagttgctaagtgagagacttaactggctggagtatcagaacaacatcatcgctttctataatcagctacaacaattggagcagatgacaactactgctgaaaactggttgaaaatccaacccaccaccccatcagagccaacagcaattaaaagtcagttaaaaatttgtaaggatgaagtcaaccggctatcaggtcttcaacctcaaattgaacgattaaaaattcaaagcatagccctgaaagagaaaggacaaggacccatgttcctggatgcagactttgtggcctttacaaatcattttaagcaagtcttttctgatgtgcaggccagagagaaagagctacagacaatttttgacactttgccaccaatgcgctatcaggagaccatgagtgccatcaggacatgggtccagcagtcagaaaccaaactctccatacctcaacttagtgtcaccgactatgaaatcatggagcagagactcggggaattgcaggctttacaaagttctctgcaagagcaacaaagtggcctatactatctcagcaccactgtgaaagagatgtcgaagaaagcgccctctgaaattagccggaaatatcaatcagaatttgaagaaattgagggacgctggaagaagctctcctcccagctggttgagcattgtcaaaagctagaggagcaaatgaataaactccgaaaaattcagaatcacatacaaaccctgaagaaatggatggctgaagttgatgtttttctgaaggaggaatggcctgcccttggggattcagaaattctaaaaaagcagctgaaacagtgcagacttttagtcagtgatattcagacaattcagcccagtctaaacagtgtcaatgaaggtgggcagaagataaagaatgaagcagagccagagtttgcttcgagacttgagacagaactcaaagaacttaacactcagtgggatcacatgtgccaacaggtctatgccagaaaggaggccttgaagggaggtttggagaaaactgtaagcctccagaaagatctatcagagatgcacgaatggatgacacaagctgaagaagagtatcttgagagagattttgaatataaaactccagatgaattacagaaagcagttgaagagatgaagagagctaaagaagaggcccaacaaaaagaagcgaaagtgaaactccttactgagtctgtaaatagtgtcatagctcaagctccacctgtagcacaagaggccttaaaaaaggaacttgaaactctaaccaccaactaccagtggctctgcactaggctgaatgggaaatgcaagactttggaagaagtttgggcatgttggcatgagttattgtcatacttggagaaagcaaacaagtggctaaatgaagtagaatttaaacttaaaaccactgaaaacattcctggcggagctgaggaaatctctgaggtgctagattcacttgaaaatttgatgcgacattcagaggataacccaaatcagattcgcatattggcacagaccctaacagatggcggagtcatggatgagctaatcaatgaggaacttgagacatttaattctcgttggagggaactacatgaagaggctgtaaggaggcaaaagttgcttgaacagagcatccagtctgcccaggagactgaaaaatccttacacttaatccaggagtccctcacattcattgacaagcagttggcagcttatattgcagacaaggtggacgcagctcaaatgcctcaggaagcccagaaaatccaatctgatttgacaagtcatgagatcagtttagaagaaatgaagaaacataatcaggggaaggaggctgcccaaagagtcctgtctcagattgatgttgcacagaaaaaattacaagatgtctccatgaagtttcgattattccagaaaccagccaattttgagctgcgtctacaagaaagtaagatgattttagatgaagtgaagatgcacttgcctgcattggaaacaaagagtgtggaacaggaagtagtacagtcacagctaaatcattgtgtgaacttgtataaaagtctgagtgaagtgaagtctgaagtggaaatggtgataaagactggacgtcagattgtacagaaaaagcagacggaaaatcccaaagaacttgatgaaagagtaacagctttgaaattgcattataatgagctgggagcaaaggtaacagaaagaaagcaacagttggagaaatgcttgaaattgtcccgtaagatgcgaaaggaaatgaatgtcttgacagaatggctggcagctacagatatggaattgacaaagagatcagcagttgaaggaatgcctagtaatttggattctgaagttgcctggggaaaggctactcaaaaagagattgagaaacagaaggtgcacctgaagagtatcacagaggtaggagaggccttgaaaacagttttgggcaagaaggagacgttggtggaagataaactcagtcttctgaatagtaactggatagctgtcacctcccgagcagaagagtggttaaatcttttgttggaataccagaaacacatggaaacttttgaccagaatgtggaccacatcacaaagtggatcattcaggctgacacacttttggatgaatcagagaaaaagaaaccccagcaaaaagaagacgtgcttaagcgtttaaaggcagaactgaatgacatacgcccaaaggtggactctacacgtgaccaagcagcaaacttgatggcaaaccgcggtgaccactgcaggaaattagtagagccccaaatctcagagctcaaccatcgatttgcagccatttcacacagaattaagactggaaaggcctccattcctttgaaggaattggagcagtttaactcagatatacaaaaattgcttgaaccactggaggctgaaattcagcagggggtgaatctgaaagaggaagacttcaataaagatatgaatgaagacaatgagggtactgtaaaagaattgttgcaaagaggagacaacttacaacaaagaatcacagatgagagaaagagagaggaaataaagataaaacagcagctgttacagacaaaacataatgctctcaaggatttgaggtctcaaagaagaaaaaaggctctagaaatttctcatcagtggtatcagtacaagaggcaggctgatgatctcctgaaatgcttggatgacattgaaaaaaaattagccagcctacctgagcccagagatgaaaggaaaataaaggaaattgatcgggaattgcagaagaagaaagaggagctgaatgcagtgcgtaggcaagctgagggcttgtctgaggatggggccgcaatggcagtggagccaactcagatccagctcagcaagcgctggcgggaaattgagagcaaatttgctcagtttcgaagactcaactttgcacaaattcacactgtccgtgaagaaacgatgatggtgatgactgaagacatgcctttggaaatttcttatgtgccttctacttatttgactgaaatcactcatgtctcacaagccctattagaagtggaacaacttctcaatgctcctgacctctgtgctaaggactttgaagatctctttaagcaagaggagtctctgaagaatataaaagatagtctacaacaaagctcaggtcggattgacattattcatagcaagaagacagcagcattgcaaagtgcaacgcctgtggaaagggtgaagctacaggaagctctctcccagcttgatttccaatgggaaaaagttaacaaaatgtacaaggaccgacaagggcgatttgacagatctgttgagaaatggcggcgttttcattatgatataaagatatttaatcagtggctaacagaagctgaacagtttctcagaaagacacaaattcctgagaattgggaacatgctaaatacaaatggtatcttaaggaactccaggatggcattgggcagcggcaaactgttgtcagaacattgaatgcaactggggaagaaataattcagcaatcctcaaaaacagatgccagtattctacaggaaaaattgggaagcctgaatctgcggtggcaggaggtctgcaaacagctgtcagacagaaaaaagaggctagaagaacaaaagaatatcttgtcagaatttcaaagagatttaaatgaatttgttttatggttggaggaagcagataacattgctagtatcccacttgaacctggaaaagagcagcaactaaaagaaaagcttgagcaagtcaagttactggtggaagagttgcccctgcgccagggaattctcaaacaattaaatgaaactggaggacccgtgcttgtaagtgctcccataagcccagaagagcaagataaacttgaaaataagctcaagcagacaaatctccagtggataaaggtttccagagctttacctgagaaacaaggagaaattgaagctcaaataaaagaccttgggcagcttgaaaaaaagcttgaagaccttgaagagcagttaaatcatctgctgctgtggttatctcctattaggaatcagttggaaatttataaccaaccaaaccaagaaggaccatttgacgttcaggaaactgaaatagcagttcaagctaaacaaccggatgtggaagagattttgtctaaagggcagcatttgtacaaggaaaaaccagccactcagccagtgaagaggaagttagaagatctgagctctgagtggaaggcggtaaaccgtttacttcaagagctgagggcaaagcagcctgacctagctcctggactgaccactattggagcctctcctactcagactgttactctggtgacacaacctgtggttactaaggaaactgccatctccaaactagaaatgccatcttccttgatgttggaggtacctgctctggcagatttcaaccgggcttggacagaacttaccgactggctttctctgcttgatcaagttataaaatcacagagggtgatggtgggtgaccttgaggatatcaacgagatgatcatcaagcagaaggcaacaatgcaggatttggaacagaggcgtccccagttggaagaactcattaccgctgcccaaaatttgaaaaacaagaccagcaatcaagaggctagaacaatcattacggatcgaattgaaagaattcagaatcagtgggatgaagtacaagaacaccttcagaaccggaggcaacagttgaatgaaatgttaaaggattcaacacaatggctggaagctaaggaagaagctgagcaggtcttaggacaggccagagccaagcttgagtcatggaaggagggtccctatacagtagatgcaatccaaaagaaaatcacagaaaccaagcagttggccaaagacctccgccagtggcagacaaatgtagatgtggcaaatgacttggccctgaaacttctccgggattattctgcagatgataccagaaaagtccacatgataacagagaatatcaatgcctcttggagaagcattcataaaagggtgagtgagcgagaggctgctttggaagaaactcatagattactgcaacagttccccctggacctggaaaagtttcttgcctggcttacagaagctgaaacaactgccaatgtcctacaggatgctacccgtaaggaaaggctcctagaagactccaagggagtaaaagagctgatgaaacaatggcaagacctccaaggtgaaattgaagctcacacagatgtttatcacaacctggatgaaaacagccaaaaaatcctgagatccctggaaggttccgatgatgcagtcctgttacaaagacgtttggataacatgaacttcaagtggagtgaacttcggaaaaagtctctcaacattaggtcccatttggaagccagttctgaccagtggaagcgtctgcacctttctctgcaggaacttctggtgtggctacagctgaaagatgatgaattaagccggcaggcacctattggaggcgactttccagcagttcagaagcagaacgatgtacatagggccttcaagagggaattgaaaactaaagaacctgtaatcatgagtactcttgagactgtacgaatatttctgacagagcagcctttggaaggactagagaaactctaccaggagcccagagagctgcctcctgaggagagagcccagaatgtcactcggcttctacgaaagcaggctgaggaggtcaatactgagtgggaaaaattgaacctgcactccgctgactggcagagaaaaatagatgagacccttgaaagactccaggaacttcaagaggccacggatgagctggacctcaagctgcgccaagctgaggtgatcaagggatcctggcagcccgtgggcgatctcctcattgactctctccaagatcacctcgagaaagtcaaggcacttcgaggagaaattgcgcctctgaaagagaacgtgagccacgtcaatgaccttgctcgccagcttaccactttgggcattcagctctcaccgtataacctcagcactctggaagacctgaacaccagatggaagcttctgcaggtggccgtcgaggaccgagtcaggcagctgcatgaagcccacagggactttggtccagcatctcagcactttctttccacgtctgtccagggtccctgggagagagccatctcgccaaacaaagtgccctactatatcaaccacgagactcaaacaacttgctgggaccatcccaaaatgacagagctctaccagtctttagctgacctgaataatgtcagattctcagcttataggactgccatgaaactccgaagactgcagaaggccctttgcttggatctcttgagcctgtcagctgcatgtgatgccttggaccagcacaacctcaagcaaaatgaccagcccatggatatcctgcagattattaattgtttgaccactatttatgaccgcctggagcaagagcacaacaatttggtcaacgtccctctctgcgtggatatgtgtctgaactggctgctgaatgtttatgatacgggacgaacagggaggatccgtgtcctgtcttttaaaactggcatcatttccctgtgtaaagcacatttggaagacaagtacagataccttttcaagcaagtggcaagttcaacaggattttgtgaccagcgcaggctgggcctccttctgcatgattctatccaaattccaagacagttgggtgaagttgcatcctttgggggcagtaacattgagccaagtgtccggagctgcttccaatttgctaataataagccagagatcgaagcggccctcttcctagactggatgagactggaaccccagtccatggtgtggctgcccgtcctgcacagagtggctgctgcagaaactgccaagcatcaggccaaatgtaacatctgcaaagagtgtccaatcattggattcaggtacaggagtctaaagcactttaattatgacatctgccaaagctgctttttttctggtcgagttgcaaaaggccataaaatgcactatcccatggtggaatattgcactccgactacatcaggagaagatgttcgagactttgccaaggtactaaaaaacaaatttcgaaccaaaaggtattttgcgaagcatccccgaatgggctacctgccagtgcagactgtcttagagggggacaacatggaaactcccgttactctgatcaacttctggccagtagattctgcgcctgcctcgtcccctcagctttcacacgatgatactcattcacgcattgaacattatgctagcaggctagcagaaatggaaaacagcaatggatcttatctaaatgatagcatctctcctaatgagagcatagatgatgaacatttgttaatccagcattactgccaaagtttgaaccaggactcccccctgagccagcctcgtagtcctgcccagatcttgatttccttagagagtgaggaaagaggggagctagagagaatcctagcagatcttgaggaagaaaacaggaatctgcaagcagaatatgaccgtctaaagcagcagcacgaacataaaggcctgtccccactgccgtcccctcctgaaatgatgcccacctctccccagagtccccgggatgctgagctcattgctgaggccaagctactgcgtcaacacaaaggccgcctggaagccaggatgcaaatcctggaagaccacaataaacagctggagtcacagttacacaggctaaggcagctgctggagcaaccccaggcagaggccaaagtgaatggcacaacggtgtcctctccttctacctctctacagaggtccgacagcagtcagcctatgctgctccgagtggttggcagtcaaacttcggactccatgggtgaggaagatcttctcagtcctccccaggacacaagcacagggttagaggaggtgatggagcaactcaacaactccttccctagttcaagaggaagaaatacccctggaaagccactgggactgtgggcactgaagtgccttttgtacttagcttttttattcatcggggtgaattgcaagttcaccatagtttttccacacaaccaaaaaggaaactggaaaaatgttccttccaattaccattattgcccgtcaagctcagatttaaattggcataatgacttaataggcacagccttacaagtcaaaatgcccaagagtcacaaggctattcaagcagacggttggatgtgtcatgcttccaaatgggtcactacttgtgatttccgctggtacggaccgaagtatataacacattccatccgatccttcactccatctgtagaacaatgcaaggaaagcattgaacaaacgaaacaaggaacttggctgaatccaggcttccctcctcaaagttgtggatatgcaactgtgacggatgctgaagcagcgattgtccaggtgactcctcaccatgtgcttgttgatgaatacacaggagaatgggttgattcacagttcatcaacggaaaatgcagcaatgacatatgccccactgtccataactccacaacctggcattccgactataaggtcaaagggctatgtgattctaacctcatttccacggacatcaccttcttctcagaggacggagagctatcatccctaggaaaggagggcacagggttcagaagtaactactttgcttatgaaactggagacaaggcctgcaaaatgcagtactgcaagcattggggagtcagactcccatcaggtgtctggttcgagatggctgataaggatctctttgctgcagccagattccctgaatgcccagaagggtcaagtatctctgctccatctcagacctcagtggatgtaagtctcattcaggacgttgagaggatcttggattattccctctgccaagaaacctggagcaaaatcagagcgggtcttcccatctctccagtggatctcagctatcttgctcctaaaaacccaggaaccggtcctgtctttaccataatcaatggtaccctaaaatactttgagaccagatacatcagagtcgatattgctgctccaatcctctcaagaatggtcggaatgatcagtggaactaccacagaaagggaactgtgggatgactgggctccatatgaagacgtggaaattggacccaatggagttctgaggaccagtttaggatataagtttcctttatatatgattggacatggtatgttggactccgatcttcatcttagctcaaaggctcaggtgtttgaacatcctcacattcaagacgctgcttcgcagcttcctgatgatgagactttattttttggtgatactgggctatccaaaaatccaatcgagtttgtagaaggttggttcagtagttggaagagctctattgcctcttttttctttatcatagggttaatcattggactattcttggttctccgagttggtatttatctttgcattaaattaaagcacaccaagaaaagacagatttatacagacatagagatgaaccgacttggaaagtaa

SEQ ID NO: 6 - protein, 4194 aa, Artificial Sequence
  Amino Acid Sequence of Proposed Dystrophin-VSV-G Chimeric Protein with VSV-G at C-terminal
  CHAIN (1)..(4194)
MLWWEEVEDCYEREDVQKKTFTKWVNAQFSKFGKQHIENLFSDLQDGRRLLDLLEGLTGQKLPKEKGSTRVHALNNVNKALRVLQNNNVDLVNIGSTDIVDGNHKLTLGLIWNIILHWQVKNVMKNIMAGLQQTNSEKILLSWVRQSTRNYPQVNVINFTTSWSDGLALNALIHSHRPDLFDWNSVVCQQSATQRLEHAFNIARYQLGIEKLLDPEDVDTTYPDKKSILMYITSLFQVLPQQVSIEAIQEVEMLPRPPKVTKEEHFQLHHQMHYSQQITVSLAQGYERTSSPKPRFKSYAYTQAAYVTTSDPTRSPFPSQHLEAPEDKSFGSSLMESEVNLDRYQTALEEVLSWLLSAEDTLQAQGEISNDVEVVKDQFHTHEGYMMDLTAHQGRVGNILQLGSKLIGTGKLSEDEETEVQEQMNLLNSRWECLRVASMEKQSNLHRVLMDLQNQKLKELNDWLTKTEERTRKMEEEPLGPDLEDLKRQVQQHKVLQEDLEQEQVRVNSLTHMVVVVDESSGDHATAALEEQLKVLGDRWANICRWTEDRWVLLQDILLKWQRLTEEQCLFSAWLSEKEDAVNKIHTTGFKDQNEMLSSLQKLAVLKADLEKKKQSMGKLYSLKQDLLSTLKNKSVTQKTEAWLDNFARCWDNLVQKLEKSTAQISQAVTTTQPSLTQTTVMETVTTVTTREQILVKHAQEELPPPPPQKKRQITVDSEIRKRLDVDITELHSWITRSEAVLQSPEFAIFRKEGNFSDLKEKVNAIEREKAEKFRKLQDASRSAQALVEQMVNEGVNADSIKQASEQLNSRWIEFCQLLSERLNWLEYQNNIIAFYNQLQQLEQMTTTAENWLKIQPTTPSEPTAIKSQLKICKDEVNRLSGLQPQIERLKIQSIALKEKGQGPMFLDADFVAFTNHFKQVFSDVQAREKELQTIFDTLPPMRYQETMSAIRTWVQQSETKLSIPQLSVTDYEIMEQRLGELQALQSSLQEQQSGLYYLSTTVKEMSKKAPSEISRKYQSEFEEIEGRWKKLSSQLVEHCQKLEEQMNKLRKIQNHIQTLKKWMAEVDVFLKEEWPALGDSEILKKQLKQCRLLVSDIQTIQPSLNSVNEGGQKIKNEAEPEFASRLETELKELNTQWDHMCQQVYARKEALKGGLEKTVSLQKDLSEMHEWMTQAEEEYLERDFEYKTPDELQKAVEEMKRAKEEAQQKEAKVKLLTESVNSVIAQAPPVAQEALKKELETLTTNYQWLCTRLNGKCKTLEEVWACWHELLSYLEKANKWLNEVEFKLKTTENIPGGAEEISEVLDSLENLMRHSEDNPNQIRILAQTLTDGGVMDELINEELETFNSRWRELHEEAVRRQKLLEQSIQSAQETEKSLHLIQESLTFIDKQLAAYIADKVDAAQMPQEAQKIQSDLTSHEISLEEMKKHNQGKEAAQRVLSQIDVAQKKLQDVSMKFRLFQKPANFELRLQESKMILDEVKMHLPALETKSVEQEVVQSQLNHCVNLYKSLSEVKSEVEMVIKTGRQIVQKKQTENPKELDERVTALKLHYNELGAKVTERKQQLEKCLKLSRKMRKEMNVLTEWLAATDMELTKRSAVEGMPSNLDSEVAWGKATQKEIEKQKVHLKSITEVGEALKTVLGKKETLVEDKLSLLNSNWIAVTSRAEEWLNLLLEYQKHMETFDQNVDHITKWIIQADTLLDESEKKKPQQKEDVLKRLKAELNDIRPKVDSTRDQAANLMANRGDHCRKLVEPQISELNHRFAAISHRIKTGKASIPLKELEQFNSDIQKLLEPLEAEIQQGVNLKEEDFNKDMNEDNEGTVKELLQRGDNLQQRITDERKREEIKIKQQLLQTKHNALKDLRSQRRKKALEISHQWYQYKRQADDLLKCLDDIEKKLASLPEPRDERKIKEIDRELQKKKEELNAVRRQAEGLSEDGAAMAVEPTQIQLSKRWREIESKFAQFRRLNFAQIHTVREETMMVMTEDMPLEISYVPSTYLTEITHVSQALLEVEQLLNAPDLCAKDFEDLFKQEESLKNIKDSLQQSSGRIDIIHSKKTAALQSATPVERVKLQEALSQLDFQWEKVNKMYKDRQGRFDRSVEKWRRFHYDIKIFNQWLTEAEQFLRKTQIPENWEHAKYKWYLKELQDGIGQRQTVVRTLNATGEEIIQQSSKTDASILQEKLGSLNLRWQEVCKQLSDRKKRLEEQKNILSEFQRDLNEFVLWLEEADNIASIPLEPGKEQQLKEKLEQVKLLVEELPLRQGILKQLNETGGPVLVSAPISPEEQDKLENKLKQTNLQWIKVSRALPEKQGEIEAQIKDLGQLEKKLEDLEEQLNHLLLWLSPIRNQLEIYNQPNQEGPFDVQETEIAVQAKQPDVEEILSKGQHLYKEKPATQPVKRKLEDLSSEWKAVNRLLQELRAKQPDLAPGLTTIGASPTQTVTLVTQPVVTKETAISKLEMPSSLMLEVPALADFNRAWTELTDWLSLLDQVIKSQRVMVGDLEDINEMIIKQKATMQDLEQRRPQLEELITAAQNLKNKTSNQEARTIITDRIERIQNQWDEVQEHLQNRRQQLNEMLKDSTQWLEAKEEAEQVLGQARAKLESWKEGPYTVDAIQKKITETKQLAKDLRQWQTNVDVANDLALKLLRDYSADDTRKVHMITENINASWRSIHKRVSEREAALEETHRLLQQFPLDLEKFLAWLTEAETTANVLQDATRKERLLEDSKGVKELMKQWQDLQGEIEAHTDVYHNLDENSQKILRSLEGSDDAVLLQRRLDNMNFKWSELRKKSLNIRSHLEASSDQWKRLHLSLQELLVWLQLKDDELSRQAPIGGDFPAVQKQNDVHRAFKRELKTKEPVIMSTLETVRIFLTEQPLEGLEKLYQEPRELPPEERAQNVTRLLRKQAEEVNTEWEKLNLHSADWQRKIDETLERLQELQEATDELDLKLRQAEVIKGSWQPVGDLLIDSLQDHLEKVKALRGEIAPLKENVSHVNDLARQLTTLGIQLSPYNLSTLEDLNTRWKLLQVAVEDRVRQLHEAHRDFGPASQHFLSTSVQGPWERAISPNKVPYYINHETQTTCWDHPKMTELYQSLADLNNVRFSAYRTAMKLRRLQKALCLDLLSLSAACDALDQHNLKQNDQPMDILQIINCLTTIYDRLEQEHNNLVNVPLCVDMCLNWLLNVYDTGRTGRIRVLSFKTGIISLCKAHLEDKYRYLFKQVASSTGFCDQRRLGLLLHDSIQIPRQLGEVASFGGSNIEPSVRSCFQFANNKPEIEAALFLDWMRLEPQSMVWLPVLHRVAAAETAKHQAKCNICKECPIIGFRYRSLKHFNYDICQSCFFSGRVAKGHKMHYPMVEYCTPTTSGEDVRDFAKVLKNKFRTKRYFAKHPRMGYLPVQTVLEGDNMETPVTLINFWPVDSAPASSPQLSHDDTHSRIEHYASRLAEMENSNGSYLNDSISPNESIDDEHLLIQHYCQSLNQDSPLSQPRSPAQILISLESEERGELERILADLEEENRNLQAEYDRLKQQHEHKGLSPLPSPPEMMPTSPQSPRDAELIAEAKLLRQHKGRLEARMQILEDHNKQLESQLHRLRQLLEQPQAEAKVNGTTVSSPSTSLQRSDSSQPMLLRVVGSQTSDSMGEEDLLSPPQDTSTGLEEVMEQLNNSFPSSRGRNTPGKPLGLWALKCLLYLAFLFIGVNCKFTIVFPHNQKGNWKNVPSNYHYCPSSSDLNWHNDLIGTALQVKMPKSHKAIQADGWMCHASKWVTTCDFRWYGPKYITHSIRSFTPSVEQCKESIEQTKQGTWLNPGFPPQSCGYATVTDAEAAIVQVTPHHVLVDEYTGEWVDSQFINGKCSNDICPTVHNSTTWHSDYKVKGLCDSNLISTDITFFSEDGELSSLGKEGTGFRSNYFAYETGDKACKMQYCKHWGVRLPSGVWFEMADKDLFAAARFPECPEGSSISAPSQTSVDVSLIQDVERILDYSLCQETWSKIRAGLPISPVLSYLAPKNPGTGPVFTIINGTLKYFETRYIRVDIAAPILSRMVGMISGTTTERELWDDWAPYEDVEIGPNGVLRTSLGYKFPLYMIGHGMLDSDLHLSSKAQVFEHPHIQDAASQLPDDETLFFGDTGLSKNPIEFVEGWFSSWKSSIASFFFIIGLIIGLFLVLRVGIYLCIKLKHTKKRQIYTDIEMNRLGK

SEQ ID NO: 7 - DNA, 7482 bp, Artificial Sequence
  Nucleotide Sequence of Proposed Dystrophin (truncated)-VSV-G Chimeric Protein with VSV-G at C-terminal
  misc_feature (1)..(7482)
atgctttggtgggaagaagtagaggactgttatgaaagagaagatgttcaaaagaaaacattcacaaaatgggtaaatgcacaattttctaagtttgggaagcagcatattgagaacctcttcagtgacctacaggatgggaggcgcctcctagacctcctcgaaggcctgacagggcaaaaactgccaaaagaaaaaggatccacaagagttcatgccctgaacaatgtcaacaaggcactgcgggttttgcagaacaataatgttgatttagtgaatattggaagtactgacatcgtagatggaaatcataaactgactcttggtttgatttggaatataatcctccactggcaggtcaaaaatgtaatgaaaaatatcatggctggattgcaacaaaccaacagtgaaaagattctcctgagctgggtccgacaatcaactcgtaattatccacaggttaatgtaatcaacttcaccaccagctggtctgatggcctggctttgaatgctctcatccatagtcataggccagacctatttgactggaatagtgtggtttgccagcagtcagccacacaacgactggaacatgcattcaacatcgccagatatcaattaggcatagagaaactactcgatcctgaagatgttgataccacctatccagataagaagtccatcttaatgtacatcacatcactcttccaagttttgcctcaacaagtgagcattgaagccatccaggaagtggaaatgttgccaaggccacctaaagtgactaaagaagaacattttcagttacatcatcaaatgcactattctcaacagatcacggtcagtctagcacagggatatgagagaacttcttcccctaagcctcgattcaagagctatgcctacacacaggctgcttatgtcaccacctctgaccctacacggagcccatttccttcacagcatttggaagctcctgaagacaagtcatttggcagttcattgatggagagtgaagtaaacctggaccgttatcaaacagctttagaagaagtattatcgtggcttctttctgctgaggacacattgcaagcacaaggagagatttctaatgatgtggaagtggtgaaagaccagtttcatactcatgaggggtacatgatggatttgacagcccatcagggccgggttggtaatattctacaattgggaagtaagctgattggaacaggaaaattatcagaagatgaagaaactgaagtacaagagcagatgaatctcctaaattcaagatgggaatgcctcagggtagctagcatggaaaaacaaagcaatttacatagagttttaatggatctccagaatcagaaactgaaagagttgaatgactggctaacaaaaacagaagaaagaacaaggaaaatggaggaagagcctcttggacctgatcttgaagacctaaaacgccaagtacaacaacataaggtgcttcaagaagatctagaacaagaacaagtcagggtcaattctctcactcacatggtggtggtagttgatgaatctagtggagatcacgcaactgctgctttggaagaacaacttaaggtattgggagatcgatgggcaaacatctgtagatggacagaagaccgctgggttcttttacaagacatccttctcaaatggcaacgtcttactgaagaacagtgcctttttagtgcatggctttcagaaaaagaagatgcagtgaacaagattcacacaactggctttaaagatcaaaatgaaatgttatcaagtcttcaaaaactggccgttttaaaagcggatctagaaaagaaaaagcaatccatgggcaaactgtattcactcaaacaagatcttctttcaacactgaagaataagtcagtgacccagaagacggaagcatggctggataactttgcccggtgttgggataatttagtccaaaaacttgaaaagagtacagcacaggaaactgaaatagcagttcaagctaaacaaccggatgtggaagagattttgtctaaagggcagcatttgtacaaggaaaaaccagccactcagccagtgaagaggaagttagaagatctgagctctgagtggaaggcggtaaaccgtttacttcaagagctgagggcaaagcagcctgacctagctcctggactgaccactattggagcctctcctactcagactgttactctggtgacacaacctgtggttactaaggaaactgccatctccaaactagaaatgccatcttccttgatgttggaggtacctgctctggcagatttcaaccgggcttggacagaacttaccgactggctttctctgcttgatcaagttataaaatcacagagggtgatggtgggtgaccttgaggatatcaacgagatgatcatcaagcagaaggcaacaatgcaggatttggaacagaggcgtccccagttggaagaactcattaccgctgcccaaaatttgaaaaacaagaccagcaatcaagaggctagaacaatcattacggatcgaattgaaagaattcagaatcagtgggatgaagtacaagaacaccttcagaaccggaggcaacagttgaatgaaatgttaaaggattcaacacaatggctggaagctaaggaagaagctgagcaggtcttaggacaggccagagccaagcttgagtcatggaaggagggtccctatacagtagatgcaatccaaaagaaaatcacagaaaccaagcagttggccaaagacctccgccagtggcagacaaatgtagatgtggcaaatgacttggccctgaaacttctccgggattattctgcagatgataccagaaaagtccacatgataacagagaatatcaatgcctcttggagaagcattcataaaagggtgagtgagcgagaggctgctttggaagaaactcatagattactgcaacagttccccctggacctggaaaagtttcttgcctggcttacagaagctgaaacaactgccaatgtcctacaggatgctacccgtaaggaaaggctcctagaagactccaagggagtaaaagagctgatgaaacaatggcaagacctccaaggtgaaattgaagctcacacagatgtttatcacaacctggatgaaaacagccaaaaaatcctgagatccctggaaggttccgatgatgcagtcctgttacaaagacgtttggataacatgaacttcaagtggagtgaacttcggaaaaagtctctcaacattaggtcccatttggaagccagttctgaccagtggaagcgtctgcacctttctctgcaggaacttctggtgtggctacagctgaaagatgatgaattaagccggcaggcacctattggaggcgactttccagcagttcagaagcagaacgatgtacatagggccttcaagagggaattgaaaactaaagaacctgtaatcatgagtactcttgagactgtacgaatatttctgacagagcagcctttggaaggactagagaaactctaccaggagcccagagagctgcctcctgaggagagagcccagaatgtcactcggcttctacgaaagcaggctgaggaggtcaatactgagtgggaaaaattgaacctgcactccgctgactggcagagaaaaatagatgagacccttgaaagactccaggaacttcaagaggccacggatgagctggacctcaagctgcgccaagctgaggtgatcaagggatcctggcagcccgtgggcgatctcctcattgactctctccaagatcacctcgagaaagtcaaggcacttcgaggagaaattgcgcctctgaaagagaacgtgagccacgtcaatgaccttgctcgccagcttaccactttgggcattcagctctcaccgtataacctcagcactctggaagacctgaacaccagatggaagcttctgcaggtggccgtcgaggaccgagtcaggcagctgcatgaagcccacagggactttggtccagcatctcagcactttctttccacgtctgtccagggtccctgggagagagccatctcgccaaacaaagtgccctactatatcaaccacgagactcaaacaacttgctgggaccatcccaaaatgacagagctctaccagtctttagctgacctgaataatgtcagattctcagcttataggactgccatgaaactccgaagactgcagaaggccctttgcttggatctcttgagcctgtcagctgcatgtgatgccttggaccagcacaacctcaagcaaaatgaccagcccatggatatcctgcagattattaattgtttgaccactatttatgaccgcctggagcaagagcacaacaatttggtcaacgtccctctctgcgtggatatgtgtctgaactggctgctgaatgtttatgatacgggacgaacagggaggatccgtgtcctgtcttttaaaactggcatcatttccctgtgtaaagcacatttggaagacaagtacagataccttttcaagcaagtggcaagttcaacaggattttgtgaccagcgcaggctgggcctccttctgcatgattctatccaaattccaagacagttgggtgaagttgcatcctttgggggcagtaacattgagccaagtgtccggagctgcttccaatttgctaataataagccagagatcgaagcggccctcttcctagactggatgagactggaaccccagtccatggtgtggctgcccgtcctgcacagagtggctgctgcagaaactgccaagcatcaggccaaatgtaacatctgcaaagagtgtccaatcattggattcaggtacaggagtctaaagcactttaattatgacatctgccaaagctgctttttttctggtcgagttgcaaaaggccataaaatgcactatcccatggtggaatattgcactccgactacatcaggagaagatgttcgagactttgccaaggtactaaaaaacaaatttcgaaccaaaaggtattttgcgaagcatccccgaatgggctacctgccagtgcagactgtcttagagggggacaacatggaaactcccgttactctgatcaacttctggccagtagattctgcgcctgcctcgtcccctcagctttcacacgatgatactcattcacgcattgaacattatgctagcaggctagcagaaatggaaaacagcaatggatcttatctaaatgatagcatctctcctaatgagagcatagatgatgaacatttgttaatccagcattactgccaaagtttgaaccaggactcccccctgagccagcctcgtagtcctgcccagatcttgatttccttagagagtgaggaaagaggggagctagagagaatcctagcagatcttgaggaagaaaacaggaatctgcaagcagaatatgaccgtctaaagcagcagcacgaacataaaggcctgtccccactgccgtcccctcctgaaatgatgcccacctctccccagagtccccgggatgctgagctcattgctgaggccaagctactgcgtcaacacaaaggccgcctggaagccaggatgcaaatcctggaagaccacaataaacagctggagtcacagttacacaggctaaggcagctgctggagcaaccccaggcagaggccaaagtgaatggcacaacggtgtcctctccttctacctctctacagaggtccgacagcagtcagcctatgctgctccgagtggttggcagtcaaacttcggactccatgggtgaggaagatcttctcagtcctccccaggacacaagcacagggttagaggaggtgatggagcaactcaacaactccttccctagttcaagaggaagaaatacccctggaaagccactgggactgtgggcactgaagtgccttttgtacttagcttttttattcatcggggtgaattgcaagttcaccatagtttttccacacaaccaaaaaggaaactggaaaaatgttccttccaattaccattattgcccgtcaagctcagatttaaattggcataatgacttaataggcacagccttacaagtcaaaatgcccaagagtcacaaggctattcaagcagacggttggatgtgtcatgcttccaaatgggtcactacttgtgatttccgctggtacggaccgaagtatataacacattccatccgatccttcactccatctgtagaacaatgcaaggaaagcattgaacaaacgaaacaaggaacttggctgaatccaggcttccctcctcaaagttgtggatatgcaactgtgacggatgctgaagcagcgattgtccaggtgactcctcaccatgtgcttgttgatgaatacacaggagaatgggttgattcacagttcatcaacggaaaatgcagcaatgacatatgccccactgtccataactccacaacctggcattccgactataaggtcaaagggctatgtgattctaacctcatttccacggacatcaccttcttctcagaggacggagagctatcatccctaggaaaggagggcacagggttcagaagtaactactttgcttatgaaactggagacaaggcctgcaaaatgcagtactgcaagcattggggagtcagactcccatcaggtgtctggttcgagatggctgataaggatctctttgctgcagccagattccctgaatgcccagaagggtcaagtatctctgctccatctcagacctcagtggatgtaagtctcattcaggacgttgagaggatcttggattattccctctgccaagaaacctggagcaaaatcagagcgggtcttcccatctctccagtggatctcagctatcttgctcctaaaaacccaggaaccggtcctgtctttaccataatcaatggtaccctaaaatactttgagaccagatacatcagagtcgatattgctgctccaatcctctcaagaatggtcggaatgatcagtggaactaccacagaaagggaactgtgggatgactgggctccatatgaagacgtggaaattggacccaatggagttctgaggaccagtttaggatataagtttcctttatatatgattggacatggtatgttggactccgatcttcatcttagctcaaaggctcaggtgtttgaacatcctcacattcaagacgctgcttcgcagcttcctgatgatgagactttattttttggtgatactgggctatccaaaaatccaatcgagtttgtagaaggttggttcagtagttggaagagctctattgcctcttttttctttatcatagggttaatcattggactattcttggttctccgagttggtatttatctttgcattaaattaaagcacaccaagaaaagacagatttatacagacatagagatgaaccgacttggaaagtaa

SEQ ID NO: 8 - protein, 2493 aa, Artificial Sequence
  Amino Acid Sequence of Proposed Dystrophin (truncated)-VSV-G Chimeric Protein with VSV-G at C-terminal
  CHAIN (1)..(2493)
MLWWEEVEDCYEREDVQKKTFTKWVNAQFSKFGKQHIENLFSDLQDGRRLLDLLEGLTGQKLPKEKGSTRVHALNNVNKALRVLQNNNVDLVNIGSTDIVDGNHKLTLGLIWNIILHWQVKNVMKNIMAGLQQTNSEKILLSWVRQSTRNYPQVNVINFTTSWSDGLALNALIHSHRPDLFDWNSVVCQQSATQRLEHAFNIARYQLGIEKLLDPEDVDTTYPDKKSILMYITSLFQVLPQQVSIEAIQEVEMLPRPPKVTKEEHFQLHHQMHYSQQITVSLAQGYERTSSPKPRFKSYAYTQAAYVTTSDPTRSPFPSQHLEAPEDKSFGSSLMESEVNLDRYQTALEEVLSWLLSAEDTLQAQGEISNDVEVVKDQFHTHEGYMMDLTAHQGRVGNILQLGSKLIGTGKLSEDEETEVQEQMNLLNSRWECLRVASMEKQSNLHRVLMDLQNQKLKELNDWLTKTEERTRKMEEEPLGPDLEDLKRQVQQHKVLQEDLEQEQVRVNSLTHMVVVVDESSGDHATAALEEQLKVLGDRWANICRWTEDRWVLLQDILLKWQRLTEEQCLFSAWLSEKEDAVNKIHTTGFKDQNEMLSSLQKLAVLKADLEKKKQSMGKLYSLKQDLLSTLKNKSVTQKTEAWLDNFARCWDNLVQKLEKSTAQETEIAVQAKQPDVEEILSKGQHLYKEKPATQPVKRKLEDLSSEWKAVNRLLQELRAKQPDLAPGLTTIGASPTQTVTLVTQPVVTKETAISKLEMPSSLMLEVPALADFNRAWTELTDWLSLLDQVIKSQRVMVGDLEDINEMIIKQKATMQDLEQRRPQLEELITAAQNLKNKTSNQEARTIITDRIERIQNQWDEVQEHLQNRRQQLNEMLKDSTQWLEAKEEAEQVLGQARAKLESWKEGPYTVDAIQKKITETKQLAKDLRQWQTNVDVANDLALKLLRDYSADDTRKVHMITENINASWRSIHKRVSEREAALEETHRLLQQFPLDLEKFLAWLTEAETTANVLQDATRKERLLEDSKGVKELMKQWQDLQGEIEAHTDVYHNLDENSQKILRSLEGSDDAVLLQRRLDNMNFKWSELRKKSLNIRSHLEASSDQWKRLHLSLQELLVWLQLKDDELSRQAPIGGDFPAVQKQNDVHRAFKRELKTKEPVIMSTLETVRIFLTEQPLEGLEKLYQEPRELPPEERAQNVTRLLRKQAEEVNTEWEKLNLHSADWQRKIDETLERLQELQEATDELDLKLRQAEVIKGSWQPVGDLLIDSLQDHLEKVKALRGEIAPLKENVSHVNDLARQLTTLGIQLSPYNLSTLEDLNTRWKLLQVAVEDRVRQLHEAHRDFGPASQHFLSTSVQGPWERAISPNKVPYYINHETQTTCWDHPKMTELYQSLADLNNVRFSAYRTAMKLRRLQKALCLDLLSLSAACDALDQHNLKQNDQPMDILQIINCLTTIYDRLEQEHNNLVNVPLCVDMCLNWLLNVYDTGRTGRIRVLSFKTGIISLCKAHLEDKYRYLFKQVASSTGFCDQRRLGLLLHDSIQIPRQLGEVASFGGSNIEPSVRSCFQFANNKPEIEAALFLDWMRLEPQSMVWLPVLHRVAAAETAKHQAKCNICKECPIIGFRYRSLKHFNYDICQSCFFSGRVAKGHKMHYPMVEYCTPTTSGEDVRDFAKVLKNKFRTKRYFAKHPRMGYLPVQTVLEGDNMETPVTLINFWPVDSAPASSPQLSHDDTHSRIEHYASRLAEMENSNGSYLNDSISPNESIDDEHLLIQHYCQSLNQDSPLSQPRSPAQILISLESEERGELERILADLEEENRNLQAEYDRLKQQHEHKGLSPLPSPPEMMPTSPQSPRDAELIAEAKLLRQHKGRLEARMQILEDHNKQLESQLHRLRQLLEQPQAEAKVNGTTVSSPSTSLQRSDSSQPMLLRVVGSQTSDSMGEEDLLSPPQDTSTGLEEVMEQLNNSFPSSRGRNTPGKPLGLWALKCLLYLAFLFIGVNCKFTIVFPHNQKGNWKNVPSNYHYCPSSSDLNWHNDLIGTALQVKMPKSHKAIQADGWMCHASKWVTTCDFRWYGPKYITHSIRSFTPSVEQCKESIEQTKQGTWLNPGFPPQSCGYATVTDAEAAIVQVTPHHVLVDEYTGEWVDSQFINGKCSNDICPTVHNSTTWHSDYKVKGLCDSNLISTDITFFSEDGELSSLGKEGTGFRSNYFAYETGDKACKMQYCKHWGVRLPSGVWFEMADKDLFAAARFPECPEGSSISAPSQTSVDVSLIQDVERILDYSLCQETWSKIRAGLPISPVDLSYLAPKNPGTGPVFTIINGTLKYFETRYIRVDIAAPILSRMVGMISGTTTERELWDDWAPYEDVEIGPNGVLRTSLGYKFPLYMIGHGMLDSDLHLSSKAQVFEHPHIQDAASQLPDDETLFFGDTGLSKNPIEFVEGWFSSWKSSIASFFFIIGLIIGLFLVLRVGIYLCIKLKHTKKRQIYTDIEMNRLGK

SEQ ID NO: 9 - DNA, 12573 bp, Artificial Sequence
  Nucleotide Sequence of proposed Dystrophin-VSV-G chimeric protein without cleavage site with VSV-G at N-terminal
  misc_feature (1)..(12573)
atgaagtgccttttgtacttagcttttttattcatcggggtgaattgcaagttcaccatagtttttccacacaaccaaaaaggaaactggaaaaatgttccttccaattaccattattgcccgtcaagctcagatttaaattggcataatgacttaataggcacagccttacaagtcaaaatgcccaagagtcacaaggctattcaagcagacggttggatgtgtcatgcttccaaatgggtcactacttgtgatttccgctggtacggaccgaagtatataacacattccatccgatccttcactccatctgtagaacaatgcaaggaaagcattgaacaaacgaaacaaggaacttggctgaatccaggcttccctcctcaaagttgtggatatgcaactgtgacggatgctgaagcagcgattgtccaggtgactcctcaccatgtgcttgttgatgaatacacaggagaatgggttgattcacagttcatcaacggaaaatgcagcaatgacatatgccccactgtccataactccacaacctggcattccgactataaggtcaaagggctatgtgattctaacctcatttccacggacatcaccttcttctcagaggacggagagctatcatccctaggaaaggagggcacagggttcagaagtaactactttgcttatgaaactggagacaaggcctgcaaaatgcagtactgcaagcattggggagtcagactcccatcaggtgtctggttcgagatggctgataaggatctctttgctgcagccagattccctgaatgcccagaagggtcaagtatctctgctccatctcagacctcagtggatgtaagtctcattcaggacgttgagaggatcttggattattccctctgccaagaaacctggagcaaaatcagagcgggtcttcccatctctccagtggatctcagctatcttgctcctaaaaacccaggaaccggtcctgtctttaccataatcaatggtaccctaaaatactttgagaccagatacatcagagtcgatattgctgctccaatcctctcaagaatggtcggaatgatcagtggaactaccacagaaagggaactgtgggatgactgggctccatatgaagacgtggaaattggacccaatggagttctgaggaccagtttaggatataagtttcctttatatatgattggacatggtatgttggactccgatcttcatcttagctcaaaggctcaggtgtttgaacatcctcacattcaagacgctgcttcgcagcttcctgatgatgagactttattttttggtgatactgggctatccaaaaatccaatcgagtttgtagaaggttggttcagtagttggaagagctctattgcctcttttttctttatcatagggttaatcattggactattcttggttctccgagttggtatttatctttgcattaaattaaagcacaccaagaaaagacagatttatacagacatagagatgaactggtgggaagaagtagaggactgttatgaaagagaagatgttcaaaagaaaacattcacaaaatgggtaaatgcacaattttctaagtttgggaagcagcatattgagaacctcttcagtgacctacaggatgggaggcgcctcctagacctcctcgaaggcctgacagggcaaaaactgccaaaagaaaaaggatccacaagagttcatgccctgaacaatgtcaacaaggcactgcgggttttgcagaacaataatgttgatttagtgaatattggaagtactgacatcgtagatggaaatcataaactgactcttggtttgatttggaatataatcctccactggcaggtcaaaaatgtaatgaaaaatatcatggctggattgcaacaaaccaacagtgaaaagattctcctgagctgggtccgacaatcaactcgtaattatccacaggttaatgtaatcaacttcaccaccagctggtctgatggcctggctttgaatgctctcatccatagtcataggccagacctatttgactggaatagtgtggtttgccagcagtcagccacacaacgactggaacatgcattcaacatcgccagatatcaattaggcatagagaaactactcgatcctgaagatgttgataccacctatccagataagaagtccatcttaatgtacatcacatcactcttccaagttttgcctcaacaagtgagcattgaagccatccaggaagtggaaatgttgccaaggccacctaaagtgactaaagaagaacattttcagttacatcatcaaatgcactattctcaacagatcacggtcagtctagcacagggatatgagagaacttcttcccctaagcctcgattcaagagctatgcctacacacaggctgcttatgtcaccacctctgaccctacacggagcccatttccttcacagcatttggaagctcctgaagacaagtcatttggcagttcattgatggagagtgaagtaaacctggaccgttatcaaacagctttagaagaagtattatcgtggcttctttctgctgaggacacattgcaagcacaaggagagatttctaatgatgtggaagtggtgaaagaccagtttcatactcatgaggggtacatgatggatttgacagcccatcagggccgggttggtaatattctacaattgggaagtaagctgattggaacaggaaaattatcagaagatgaagaaactgaagtacaagagcagatgaatctcctaaattcaagatgggaatgcctcagggtagctagcatggaaaaacaaagcaatttacatagagttttaatggatctccagaatcagaaactgaaagagttgaatgactggctaacaaaaacagaagaaagaacaaggaaaatggaggaagagcctcttggacctgatcttgaagacctaaaacgccaagtacaacaacataaggtgcttcaagaagatctagaacaagaacaagtcagggtcaattctctcactcacatggtggtggtagttgatgaatctagtggagatcacgcaactgctgctttggaagaacaacttaaggtattgggagatcgatgggcaaacatctgtagatggacagaagaccgctgggttcttttacaagacatccttctcaaatggcaacgtcttactgaagaacagtgcctttttagtgcatggctttcagaaaaagaagatgcagtgaacaagattcacacaactggctttaaagatcaaaatgaaatgttatcaagtcttcaaaaactggccgttttaaaagcggatctagaaaagaaaaagcaatccatgggcaaactgtattcactcaaacaagatcttctttcaacactgaagaataagtcagtgacccagaagacggaagcatggctggataactttgcccggtgttgggataatttagtccaaaaacttgaaaagagtacagcacagatttcacaggctgtcaccaccactcagccatcactaacacagacaactgtaatggaaacagtaactacggtgaccacaagggaacagatcctggtaaagcatgctcaagaggaacttccaccaccacctccccaaaagaagaggcagattactgtggattctgaaattaggaaaaggttggatgttgatataactgaacttcacagctggattactcgctcagaagctgtgttgcagagtcctgaatttgcaatctttcggaaggaaggcaacttctcagacttaaaagaaaaagtcaatgccatagagcgagaaaaagctgagaagttcagaaaactgcaagatgccagcagatcagctcaggccctggtggaacagatggtgaatgagggtgttaatgcagatagcatcaaacaagcctcagaacaactgaacagccggtggatcgaattctgccagttgctaagtgagagacttaactggctggagtatcagaacaacatcatcgctttctataatcagctacaacaattggagcagatgacaactactgctgaaaactggttgaaaatccaacccaccaccccatcagagccaacagcaattaaaagtcagttaaaaatttgtaaggatgaagtcaaccggctatcaggtcttcaacctcaaattgaacgattaaaaattcaaagcatagccctgaaagagaaaggacaaggacccatgttcctggatgcagactttgtggcctttacaaatcattttaagcaagtcttttctgatgtgcaggccagagagaaagagctacagacaatttttgacactttgccaccaatgcgctatcaggagaccatgagtgccatcaggacatgggtccagcagtcagaaaccaaactctccatacctcaacttagtgtcaccgactatgaaatcatggagcagagactcggggaattgcaggctttacaaagttctctgcaagagcaacaaagtggcctatactatctcagcaccactgtgaaagagatgtcgaagaaagcgccctctgaaattagccggaaatatcaatcagaatttgaagaaattgagggacgctggaagaagctctcctcccagctggttgagcattgtcaaaagctagaggagcaaatgaataaactccgaaaaattcagaatcacatacaaaccctgaagaaatggatggctgaagttgatgtttttctgaaggaggaatggcctgcccttggggattcagaaattctaaaaaagcagctgaaacagtgcagacttttagtcagtgatattcagacaattcagcccagtctaaacagtgtcaatgaaggtgggcagaagataaagaatgaagcagagccagagtttgcttcgagacttgagacagaactcaaagaacttaacactcagtgggatcacatgtgccaacaggtctatgccagaaaggaggccttgaagggaggtttggagaaaactgtaagcctccagaaagatctatcagagatgcacgaatggatgacacaagctgaagaagagtatcttgagagagattttgaatataaaactccagatgaattacagaaagcagttgaagagatgaagagagctaaagaagaggcccaacaaaaagaagcgaaagtgaaactccttactgagtctgtaaatagtgtcatagctcaagctccacctgtagcacaagaggccttaaaaaaggaacttgaaactctaaccaccaactaccagtggctctgcactaggctgaatgggaaatgcaagactttggaagaagtttgggcatgttggcatgagttattgtcatacttggagaaagcaaacaagtggctaaatgaagtagaatttaaacttaaaaccactgaaaacattcctggcggagctgaggaaatctctgaggtgctagattcacttgaaaatttgatgcgacattcagaggataacccaaatcagattcgcatattggcacagaccctaacagatggcggagtcatggatgagctaatcaatgaggaacttgagacatttaattctcgttggagggaactacatgaagaggctgtaaggaggcaaaagttgcttgaacagagcatccagtctgcccaggagactgaaaaatccttacacttaatccaggagtccctcacattcattgacaagcagttggcagcttatattgcagacaaggtggacgcagctcaaatgcctcaggaagcccagaaaatccaatctgatttgacaagtcatgagatcagtttagaagaaatgaagaaacataatcaggggaaggaggctgcccaaagagtcctgtctcagattgatgttgcacagaaaaaattacaagatgtctccatgaagtttcgattattccagaaaccagccaattttgagctgcgtctacaagaaagtaagatgattttagatgaagtgaagatgcacttgcctgcattggaaacaaagagtgtggaacaggaagtagtacagtcacagctaaatcattgtgtgaacttgtataaaagtctgagtgaagtgaagtctgaagtggaaatggtgataaagactggacgtcagattgtacagaaaaagcagacggaaaatcccaaagaacttgatgaaagagtaacagctttgaaattgcattataatgagctgggagcaaaggtaacagaaagaaagcaacagttggagaaatgcttgaaattgtcccgtaagatgcgaaaggaaatgaatgtcttgacagaatggctggcagctacagatatggaattgacaaagagatcagcagttgaaggaatgcctagtaatttggattctgaagttgcctggggaaaggctactcaaaaagagattgagaaacagaaggtgcacctgaagagtatcacagaggtaggagaggccttgaaaacagttttgggcaagaaggagacgttggtggaagataaactcagtcttctgaatagtaactggatagctgtcacctcccgagcagaagagtggttaaatcttttgttggaataccagaaacacatggaaacttttgaccagaatgtggaccacatcacaaagtggatcattcaggctgacacacttttggatgaatcagagaaaaagaaaccccagcaaaaagaagacgtgcttaagcgtttaaaggcagaactgaatgacatacgcccaaaggtggactctacacgtgaccaagcagcaaacttgatggcaaaccgcggtgaccactgcaggaaattagtagagccccaaatctcagagctcaaccatcgatttgcagccatttcacacagaattaagactggaaaggcctccattcctttgaaggaattggagcagtttaactcagatatacaaaaattgcttgaaccactggaggctgaaattcagcagggggtgaatctgaaagaggaagacttcaataaagatatgaatgaagacaatgagggtactgtaaaagaattgttgcaaagaggagacaacttacaacaaagaatcacagatgagagaaagagagaggaaataaagataaaacagcagctgttacagacaaaacataatgctctcaaggatttgaggtctcaaagaagaaaaaaggctctagaaatttctcatcagtggtatcagtacaagaggcaggctgatgatctcctgaaatgcttggatgacattgaaaaaaaattagccagcctacctgagcccagagatgaaaggaaaataaaggaaattgatcgggaattgcagaagaagaaagaggagctgaatgcagtgcgtaggcaagctgagggcttgtctgaggatggggccgcaatggcagtggagccaactcagatccagctcagcaagcgctggcgggaaattgagagcaaatttgctcagtttcgaagactcaactttgcacaaattcacactgtccgtgaagaaacgatgatggtgatgactgaagacatgcctttggaaatttcttatgtgccttctacttatttgactgaaatcactcatgtctcacaagccctattagaagtggaacaacttctcaatgctcctgacctctgtgctaaggactttgaagatctctttaagcaagaggagtctctgaagaatataaaagatagtctacaacaaagctcaggtcggattgacattattcatagcaagaagacagcagcattgcaaagtgcaacgcctgtggaaagggtgaagctacaggaagctctctcccagcttgatttccaatgggaaaaagttaacaaaatgtacaaggaccgacaagggcgatttgacagatctgttgagaaatggcggcgttttcattatgatataaagatatttaatcagtggctaacagaagctgaacagtttctcagaaagacacaaattcctgagaattgggaacatgctaaatacaaatggtatcttaaggaactccaggatggcattgggcagcggcaaactgttgtcagaacattgaatgcaactggggaagaaataattcagcaatcctcaaaaacagatgccagtattctacaggaaaaattgggaagcctgaatctgcggtggcaggaggtctgcaaacagctgtcagacagaaaaaagaggctagaagaacaaaagaatatcttgtcagaatttcaaagagatttaaatgaatttgttttatggttggaggaagcagataacattgctagtatcccacttgaacctggaaaagagcagcaactaaaagaaaagcttgagcaagtcaagttactggtggaagagttgcccctgcgccagggaattctcaaacaattaaatgaaactggaggacccgtgcttgtaagtgctcccataagcccagaagagcaagataaacttgaaaataagctcaagcagacaaatctccagtggataaaggtttccagagctttacctgagaaacaaggagaaattgaagctcaaataaaagaccttgggcagcttgaaaaaaagcttgaagaccttgaagagcagttaaatcatctgctgctgtggttatctcctattaggaatcagttggaaatttataaccaaccaaaccaagaaggaccatttgacgttcaggaaactgaaatagcagttcaagctaaacaaccggatgtggaagagattttgtctaaagggcagcatttgtacaaggaaaaaccagccactcagccagtgaagaggaagttagaagatctgagctctgagtggaaggcggtaaaccgtttacttcaagagctgagggcaaagcagcctgacctagctcctggactgaccactattggagcctctcctactcagactgttactctggtgacacaacctgtggttactaaggaaactgccatctccaaactagaaatgccatcttccttgatgttggaggtacctgctctggcagatttcaaccgggcttggacagaacttaccgactggctttctctgcttgatcaagttataaaatcacagagggtgatggtgggtgaccttgaggatatcaacgagatgatcatcaagcagaaggcaacaatgcaggatttggaacagaggcgtccccagttggaagaactcattaccgctgcccaaaatttgaaaaacaagaccagcaatcaagaggctagaacaatcattacggatcgaattgaaagaattcagaatcagtgggatgaagtacaagaacaccttcagaaccggaggcaacagttgaatgaaatgttaaaggattcaacacaatggctggaagctaaggaagaagctgagcaggtcttaggacaggccagagccaagcttgagtcatggaaggagggtccctatacagtagatgcaatccaaaagaaaatcacagaaaccaagcagttggccaaagacctccgccagtggcagacaaatgtagatgtggcaaatgacttggccctgaaacttctccgggattattctgcagatgataccagaaaagtccacatgataacagagaatatcaatgcctcttggagaagcattcataaaagggtgagtgagcgagaggctgctttggaagaaactcatagattactgcaacagttccccctggacctggaaaagtttcttgcctggcttacagaagctgaaacaactgccaatgtcctacaggatgctacccgtaaggaaaggctcctagaagactccaagggagtaaaagagctgatgaaacaatggcaagacctccaaggtgaaattgaagctcacacagatgtttatcacaacctggatgaaaacagccaaaaaatcctgagatccctggaaggttccgatgatgcagtcctgttacaaagacgtttggataacatgaacttcaagtggagtgaacttcggaaaaagtctctcaacattaggtcccatttggaagccagttctgaccagtggaagcgtctgcacctttctctgcaggaacttctggtgtggctacagctgaaagatgatgaattaagccggcaggcacctattggaggcgactttccagcagttcagaagcagaacgatgtacatagggccttcaagagggaattgaaaactaaagaacctgtaatcatgagtactcttgagactgtacgaatatttctgacagagcagcctttggaaggactagagaaactctaccaggagcccagagagctgcctcctgaggagagagcccagaatgtcactcggcttctacgaaagcaggctgaggaggtcaatactgagtgggaaaaattgaacctgcactccgctgactggcagagaaaaatagatgagacccttgaaagactccaggaacttcaagaggccacggatgagctggacctcaagctgcgccaagctgaggtgatcaagggatcctggcagcccgtgggcgatctcctcattgactctctccaagatcacctcgagaaagtcaaggcacttcgaggagaaattgcgcctctgaaagagaacgtgagccacgtcaatgaccttgctcgccagcttaccactttgggcattcagctctcaccgtataacctcagcactctggaagacctgaacaccagatggaagcttctgcaggtggccgtcgaggaccgagtcaggcagctgcatgaagcccacagggactttggtccagcatctcagcactttctttccacgtctgtccagggtccctgggagagagccatctcgccaaacaaagtgccctactatatcaaccacgagactcaaacaacttgctgggaccatcccaaaatgacagagctctaccagtctttagctgacctgaataatgtcagattctcagcttataggactgccatgaaactccgaagactgcagaaggccctttgcttggatctcttgagcctgtcagctgcatgtgatgccttggaccagcacaacctcaagcaaaatgaccagcccatggatatcctgcagattattaattgtttgaccactatttatgaccgcctggagcaagagcacaacaatttggtcaacgtccctctctgcgtggatatgtgtctgaactggctgctgaatgtttatgatacgggacgaacagggaggatccgtgtcctgtcttttaaaactggcatcatttccctgtgtaaagcacatttggaagacaagtacagataccttttcaagcaagtggcaagttcaacaggattttgtgaccagcgcaggctgggcctccttctgcatgattctatccaaattccaagacagttgggtgaagttgcatcctttgggggcagtaacattgagccaagtgtccggagctgcttccaatttgctaataataagccagagatcgaagcggccctcttcctagactggatgagactggaaccccagtccatggtgtggctgcccgtcctgcacagagtggctgctgcagaaactgccaagcatcaggccaaatgtaacatctgcaaagagtgtccaatcattggattcaggtacaggagtctaaagcactttaattatgacatctgccaaagctgctttttttctggtcgagttgcaaaaggccataaaatgcactatcccatggtggaatattgcactccgactacatcaggagaagatgttcgagactttgccaaggtactaaaaaacaaatttcgaaccaaaaggtattttgcgaagcatccccgaatgggctacctgccagtgcagactgtcttagagggggacaacatggaaactcccgttactctgatcaacttctggccagtagattctgcgcctgcctcgtcccctcagctttcacacgatgatactcattcacgcattgaacattatgctagcaggctagcagaaatggaaaacagcaatggatcttatctaaatgatagcatctctcctaatgagagcatagatgatgaacatttgttaatccagcattactgccaaagtttgaaccaggactcccccctgagccagcctcgtagtcctgcccagatcttgatttccttagagagtgaggaaagaggggagctagagagaatcctagcagatcttgaggaagaaaacaggaatctgcaagcagaatatgaccgtctaaagcagcagcacgaacataaaggcctgtccccactgccgtcccctcctgaaatgatgcccacctctccccagagtccccgggatgctgagctcattgctgaggccaagctactgcgtcaacacaaaggccgcctggaagccaggatgcaaatcctggaagaccacaataaacagctggagtcacagttacacaggctaaggcagctgctggagcaaccccaggcagaggccaaagtgaatggcacaacggtgtcctctccttctacctctctacagaggtccgacagcagtcagcctatgctgctccgagtggttggcagtcaaacttcggactccatgggtgaggaagatcttctcagtcctccccaggacacaagcacagggttagaggaggtgatggagcaactcaacaactccttccctagttcaagaggaagaaatacccctggaaagccaatgagagaggacacaatgtag

SEQ ID NO: 10 - protein, 4190 aa, Artificial Sequence
  Amino Acid Sequence of proposed Dystrophin-VSV-G chimeric protein without cleavage site with VSV-G at N-terminal
  MISC_FEATURE (1)..(4190)
MKCLLYLAFLFIGVNCKFTIVFPHNQKGNWKNVPSNYHYCPSSSDLNWHNDLIGTALQVKMPKSHKAIQADGWMCHASKWVTTCDFRWYGPKYITHSIRSFTPSVEQCKESIEQTKQGTWLNPGFPPQSCGYATVTDAEAAIVQVTPHHVLVDEYTGEWVDSQFINGKCSNDICPTVHNSTTWHSDYKVKGLCDSNLISTDITFFSEDGELSSLGKEGTGFRSNYFAYETGDKACKMQYCKHWGVRLPSGVWFEMADKDLFAAARFPECPEGSSISAPSQTSVDVSLIQDVERILDYSLCQETWSKIRAGLPISPVDLSYLAPKNPGTGPVFTIINGTLKYFETRYIRVDIAAPILSRMVGMISGTTTERELWDDWAPYEDVEIGPNGVLRTSLGYKFPLYMIGHGMLDSDLHLSSKAQVFEHPHIQDAASQLPDDETLFFGDTGLSKNPIEFVEGWFSSWKSSIASFFFIIGLIIGLFLVLRVGIYLCIKLKHTKKRQIYTDIEMNWWEEVEDCYEREDVQKKTFTKWVNAQFSKFGKQHIENLFSDLQDGRRLLDLLEGLTGQKLPKEKGSTRVHALNNVNKALRVLQNNNVDLVNIGSTDIVDGNHKLTLGLIWNIILHWQVKNVMKNIMAGLQQTNSEKILLSWVRQSTRNYPQVNVINFTTSWSDGLALNALIHSHRPDLFDWNSVVCQQSATQRLEHAFNIARYQLGIEKLLDPEDVDTTYPDKKSILMYITSLFQVLPQQVSIEAIQEVEMLPRPPKVTKEEHFQLHHQMHYSQQITVSLAQGYERTSSPKPRFKSYAYTQAAYVTTSDPTRSPFPSQHLEAPEDKSFGSSLMESEVNLDRYQTALEEVLSWLLSAEDTLQAQGEISNDVEVVKDQFHTHEGYMMDLTAHQGRVGNILQLGSKLIGTGKLSEDEETEVQEQMNLLNSRWECLRVASMEKQSNLHRVLMDLQNQKLKELNDWLTKTEERTRKMEEEPLGPDLEDLKRQVQQHKVLQEDLEQEQVRVNSLTHMVVVVDESSGDHATAALEEQLKVLGDRWANICRWTEDRWVLLQDILLKWQRLTEEQCLFSAWLSEKEDAVNKIHTTGFKDQNEMLSSLQKLAVLKADLEKKKQSMGKLYSLKQDLLSTLKNKSVTQKTEAWLDNFARCWDNLVQKLEKSTAQISQAVTTTQPSLTQTTVMETVTTVTTREQILVKHAQEELPPPPPQKKRQITVDSEIRKRLDVDITELHSWITRSEAVLQSPEFAIFRKEGNFSDLKEKVNAIEREKAEKFRKLQDASRSAQALVEQMVNEGVNADSIKQASEQLNSRWIEFCQLLSERLNWLEYQNNIIAFYNQLQQLEQMTTTAENWLKIQPTTPSEPTAIKSQLKICKDEVNRLSGLQPQIERLKIQSIALKEKGQGPMFLDADFVAFTNHFKQVFSDVQAREKELQTIFDTLPPMRYQETMSAIRTWVQQSETKLSIPQLSVTDYEIMEQRLGELQALQSSLQEQQSGLYYLSTTVKEMSKKAPSEISRKYQSEFEEIEGRWKKLSSQLVEHCQKLEEQMNKLRKIQNHIQTLKKWMAEVDVFLKEEWPALGDSEILKKQLKQCRLLVSDIQTIQPSLNSVNEGGQKIKNEAEPEFASRLETELKELNTQWDHMCQQVYARKEALKGGLEKTVSLQKDLSEMHEWMTQAEEEYLERDFEYKTPDELQKAVEEMKRAKEEAQQKEAKVKLLTESVNSVIAQAPPVAQEALKKELETLTTNYQWLCTRLNGKCKTLEEVWACWHELLSYLEKANKWLNEVEFKLKTTENIPGGAEEISEVLDSLENLMRHSEDNPNQIRILAQTLTDGGVMDELINEELETFNSRWRELHEEAVRRQKLLEQSIQSAQETEKSLHLIQESLTFIDKQLAAYIADKVDAAQMPQEAQKIQSDLTSHEISLEEMKKHNQGKEAAQRVLSQIDVAQKKLQDVSMKFRLFQKPANFELRLQESKMILDEVKMHLPALETKSVEQEVVQSQLNHCVNLYKSLSEVKSEVEMVIKTGRQIVQKKQTENPKELDERVTALKLHYNELGAKVTERKQQLEKCLKLSRKMRKEMNVLTEWLAATDMELTKRSAVEGMPSNLDSEVAWGKATQKEIEKQKVHLKSITEVGEALKTVLGKKETLVEDKLSLLNSNWIAVTSRAEEWLNLLLEYQKHMETFDQNVDHITKWIIQADTLLDESEKKKPQQKEDVLKRLKAELNDIRPKVDSTRDQAANLMANRGDHCRKLVEPQISELNHRFAAISHRIKTGKASIPLKELEQFNSDIQKLLEPLEAEIQQGVNLKEEDFNKDMNEDNEGTVKELLQRGDNLQQRITDERKREEIKIKQQLLQTKHNALKDLRSQRRKKALEISHQWYQYKRQADDLLKCLDDIEKKLASLPEPRDERKIKEIDRELQKKKEELNAVRRQAEGLSEDGAAMAVEPTQIQLSKRWREIESKFAQFRRLNFAQIHTVREETMMVMTEDMPLEISYVPSTYLTEITHVSQALLEVEQLLNAPDLCAKDFEDLFKQEESLKNIKDSLQQSSGRIDIIHSKKTAALQSATPVERVKLQEALSQLDFQWEKVNKMYKDRQGRFDRSVEKWRRFHYDIKIFNQWLTEAEQFLRKTQIPENWEHAKYKWYLKELQDGIGQRQTVVRTLNATGEEIIQQSSKTDASILQEKLGSLNLRWQEVCKQLSDRKKRLEEQKNILSEFQRDLNEFVLWLEEADNIASIPLEPGKEQQLKEKLEQVKLLVEELPLRQGILKQLNETGGPVLVSAPISPEEQDKLENKLKQTNLQWIKVSRALPEKQGEIEAQIKDLGQLEKKLEDLEEQLNHLLLWLSPIRNQLEIYNQPNQEGPFDVQETEIAVQAKQPDVEEILSKGQHLYKEKPATQPVKRKLEDLSSEWKAVNRLLQELRAKQPDLAPGLTTIGASPTQTVTLVTQPVVTKETAISKLEMPSSLMLEVPALADFNRAWTELTDWLSLLDQVIKSQRVMVGDLEDINEMIIKQKATMQDLEQRRPQLEELITAAQNLKNKTSNQEARTIITDRIERIQNQWDEVQEHLQNRRQQLNEMLKDSTQWLEAKEEAEQVLGQARAKLESWKEGPYTVDAIQKKITETKQLAKDLRQWQTNVDVANDLALKLLRDYSADDTRKVHMITENINASWRSIHKRVSEREAALEETHRLLQQFPLDLEKFLAWLTEAETTANVLQDATRKERLLEDSKGVKELMKQWQDLQGEIEAHTDVYHNLDENSQKILRSLEGSDDAVLLQRRLDNMNFKWSELRKKSLNIRSHLEASSDQWKRLHLSLQELLVWLQLKDDELSRQAPIGGDFPAVQKQNDVHRAFKRELKTKEPVIMSTLETVRIFLTEQPLEGLEKLYQEPRELPPEERAQNVTRLLRKQAEEVNTEWEKLNLHSADWQRKIDETLERLQELQEATDELDLKLRQAEVIKGSWQPVGDLLIDSLQDHLEKVKALRGEIAPLKENVSHVNDLARQLTTLGIQLSPYNLSTLEDLNTRWKLLQVAVEDRVRQLHEAHRDFGPASQHFLSTSVQGPWERAISPNKVPYYINHETQTTCWDHPKMTELYQSLADLNNVRFSAYRTAMKLRRLQKALCLDLLSLSAACDALDQHNLKQNDQPMDILQIINCLTTIYDRLEQEHNNLVNVPLCVDMCLNWLLNVYDTGRTGRIRVLSFKTGIISLCKAHLEDKYRYLFKQVASSTGFCDQRRLGLLLHDSIQIPRQLGEVASFGGSNIEPSVRSCFQFANNKPEIEAALFLDWMRLEPQSMVWLPVLHRVAAAETAKHQAKCNICKECPIIGFRYRSLKHFNYDICQSCFFSGRVAKGHKMHYPMVEYCTPTTSGEDVRDFAKVLKNKFRTKRYFAKHPRMGYLPVQTVLEGDNMETPVTLINFWPVDSAPASSPQLSHDDTHSRIEHYASRLAEMENSNGSYLNDSISPNESIDDEHLLIQHYCQSLNQDSPLSQPRSPAQILISLESEERGELERILADLEEENRNLQAEYDRLKQQHEHKGLSPLPSPPEMMPTSPQSPRDAELIAEAKLLRQHKGRLEARMQILEDHNKQLESQLHRLRQLLEQPQAEAKVNGTTVSSPSTSLQRSDSSQPMLLRVVGSQTSDSMGEEDLLSPPQDTSTGLEEVMEQLNNSFPSSRGRNTPGKPMREDTM

SEQ ID NO: 11 - DNA, 7467 bp, Artificial Sequence
  Nucleotide Sequence of proposed truncated Dystrophin-VSV-G chimeric protein without cleavage site with VSV-G at N-terminal
  misc_feature (1)..(7467)
atgaagtgccttttgtacttagcttttttattcatcggggtgaattgcaagttcaccatagtttttccacacaaccaaaaaggaaactggaaaaatgttccttccaattaccattattgcccgtcaagctcagatttaaattggcataatgacttaataggcacagccttacaagtcaaaatgcccaagagtcacaaggctattcaagcagacggttggatgtgtcatgcttccaaatgggtcactacttgtgatttccgctggtacggaccgaagtatataacacattccatccgatccttcactccatctgtagaacaatgcaaggaaagcattgaacaaacgaaacaaggaacttggctgaatccaggcttccctcctcaaagttgtggatatgcaactgtgacggatgctgaagcagcgattgtccaggtgactcctcaccatgtgcttgttgatgaatacacaggagaatgggttgattcacagttcatcaacggaaaatgcagcaatgacatatgccccactgtccataactccacaacctggcattccgactataaggtcaaagggctatgtgattctaacctcatttccacggacatcaccttcttctcagaggacggagagctatcatccctaggaaaggagggcacagggttcagaagtaactactttgcttatgaaactggagacaaggcctgcaaaatgcagtactgcaagcattggggagtcagactcccatcaggtgtctggttcgagatggctgataaggatctctttgctgcagccagattccctgaatgcccagaagggtcaagtatctctgctccatctcagacctcagtggatgtaagtctcattcaggacgttgagaggatcttggattattccctctgccaagaaacctggagcaaaatcagagcgggtcttcccatctctccagtggatctcagctatcttgctcctaaaaacccaggaaccggtcctgtctttaccataatcaatggtaccctaaaatactttgagaccagatacatcagagtcgatattgctgctccaatcctctcaagaatggtcggaatgatcagtggaactaccacagaaagggaactgtgggatgactgggctccatatgaagacgtggaaattggacccaatggagttctgaggaccagtttaggatataagtttcctttatatatgattggacatggtatgttggactccgatcttcatcttagctcaaaggctcaggtgtttgaacatcctcacattcaagacgctgcttcgcagcttcctgatgatgagactttattttttggtgatactgggctatccaaaaatccaatcgagtttgtagaaggttggttcagtagttggaagagctctattgcctcttttttctttatcatagggttaatcattggactattcttggttctccgagttggtatttatctttgcattaaattaaagcacaccaagaaaagacagatttatacagacatagagatgaactggtgggaagaagtagaggactgttatgaaagagaagatgttcaaaagaaaacattcacaaaatgggtaaatgcacaattttctaagtttgggaagcagcatattgagaacctcttcagtgacctacaggatgggaggcgcctcctagacctcctcgaaggcctgacagggcaaaaactgccaaaagaaaaaggatccacaagagttcatgccctgaacaatgtcaacaaggcactgcgggttttgcagaacaataatgttgatttagtgaatattggaagtactgacatcgtagatggaaatcataaactgactcttggtttgatttggaatataatcctccactggcaggtcaaaaatgtaatgaaaaatatcatggctggattgcaacaaaccaacagtgaaaagattctcctgagctgggtccgacaatcaactcgtaattatccacaggttaatgtaatcaacttcaccaccagctggtctgatggcctggctttgaatgctctcatccatagtcataggccagacctatttgactggaatagtgtggtttgccagcagtcagccacacaacgactggaacatgcattcaacatcgccagatatcaattaggcatagagaaactactcgatcctgaagatgttgataccacctatccagataagaagtccatcttaatgtacatcacatcactcttccaagttttgcctcaacaagtgagcattgaagccatccaggaagtggaaatgttgccaaggccacctaaagtgactaaagaagaacattttcagttacatcatcaaatgcactattctcaacagatcacggtcagtctagcacagggatatgagagaacttcttcccctaagcctcgattcaagagctatgcctacacacaggctgcttatgtcaccacctctgaccctacacggagcccatttccttcacagcatttggaagctcctgaagacaagtcatttggcagttcattgatggagagtgaagtaaacctggaccgttatcaaacagctttagaagaagtattatcgtggcttctttctgctgaggacacattgcaagcacaaggagagatttctaatgatgtggaagtggtgaaagaccagtttcatactcatgaggggtacatgatggatttgacagcccatcagggccgggttggtaatattctacaattgggaagtaagctgattggaacaggaaaattatcagaagatgaagaaactgaagtacaagagcagatgaatctcctaaattcaagatgggaatgcctcagggtagctagcatggaaaaacaaagcaatttacatagagttttaatggatctccagaatcagaaactgaaagagttgaatgactggctaacaaaaacagaagaaagaacaaggaaaatggaggaagagcctcttggacctgatcttgaagacctaaaacgccaagtacaacaacataaggtgcttcaagaagatctagaacaagaacaagtcagggtcaattctctcactcacatggtggtggtagttgatgaatctagtggagatcacgcaactgctgctttggaagaacaacttaaggtattgggagatcgatgggcaaacatctgtagatggacagaagaccgctgggttcttttacaagacatccttctcaaatggcaacgtcttactgaagaacagtgcctttttagtgcatggctttcagaaaaagaagatgcagtgaacaagattcacacaactggctttaaagatcaaaatgaaatgttatcaagtcttcaaaaactggccgttttaaaagcggatctagaaaagaaaaagcaatccatgggcaaactgtattcactcaaacaagatcttctttcaacactgaagaataagtcagtgacccagaagacggaagcatggctggataactttgcccggtgttgggataatttagtccaaaaacttgaaaagagtacagcacaggaaactgaaatagcagttcaagctaaacaaccggatgtggaagagattttgtctaaagggcagcatttgtacaaggaaaaaccagccactcagccagtgaagaggaagttagaagatctgagctctgagtggaaggcggtaaaccgtttacttcaagagctgagggcaaagcagcctgacctagctcctggactgaccactattggagcctctcctactcagactgttactctggtgacacaacctgtggttactaaggaaactgccatctccaaactagaaatgccatcttccttgatgttggaggtacctgctctggcagatttcaaccgggcttggacagaacttaccgactggctttctctgcttgatcaagttataaaatcacagagggtgatggtgggtgaccttgaggatatcaacgagatgatcatcaagcagaaggcaacaatgcaggatttggaacagaggcgtccccagttggaagaactcattaccgctgcccaaaatttgaaaaacaagaccagcaatcaagaggctagaacaatcattacggatcgaattgaaagaattcagaatcagtgggatgaagtacaagaacaccttcagaaccggaggcaacagttgaatgaaatgttaaaggattcaacacaatggctggaagctaaggaagaagctgagcaggtcttaggacaggccagagccaagcttgagtcatggaaggagggtccctatacagtagatgcaatccaaaagaaaatcacagaaaccaagcagttggccaaagacctccgccagtggcagacaaatgtagatgtggcaaatgacttggccctgaaacttctccgggattattctgcagatgataccagaaaagtccacatgataacagagaatatcaatgcctcttggagaagcattcataaaagggtgagtgagcgagaggctgctttggaagaaactcatagattactgcaacagttccccctggacctggaaaagtttcttgcctggcttacagaagctgaaacaactgccaatgtcctacaggatgctacccgtaaggaaaggctcctagaagactccaagggagtaaaagagctgatgaaacaatggcaagacctccaaggtgaaattgaagctcacacagatgtttatcacaacctggatgaaaacagccaaaaaatcctgagatccctggaaggttccgatgatgcagtcctgttacaaagacgtttggataacatgaacttcaagtggagtgaacttcggaaaaagtctctcaacattaggtcccatttggaagccagttctgaccagtggaagcgtctgcacctttctctgcaggaacttctggtgtggctacagctgaaagatgatgaattaagccggcaggcacctattggaggcgactttccagcagttcagaagcagaacgatgtacatagggccttcaagagggaattgaaaactaaagaacctgtaatcatgagtactcttgagactgtacgaatatttctgacagagcagcctttggaaggactagagaaactctaccaggagcccagagagctgcctcctgaggagagagcccagaatgtcactcggcttctacgaaagcaggctgaggaggtcaatactgagtgggaaaaattgaacctgcactccgctgactggcagagaaaaatagatgagacccttgaaagactccaggaacttcaagaggccacggatgagctggacctcaagctgcgccaagctgaggtgatcaagggatcctggcagcccgtgggcgatctcctcattgactctctccaagatcacctcgagaaagtcaaggcacttcgaggagaaattgcgcctctgaaagagaacgtgagccacgtcaatgaccttgctcgccagcttaccactttgggcattcagctctcaccgtataacctcagcactctggaagacctgaacaccagatggaagcttctgcaggtggccgtcgaggaccgagtcaggcagctgcatgaagcccacagggactttggtccagcatctcagcactttctttccacgtctgtccagggtccctgggagagagccatctcgccaaacaaagtgccctactatatcaaccacgagactcaaacaacttgctgggaccatcccaaaatgacagagctctaccagtctttagctgacctgaataatgtcagattctcagcttataggactgccatgaaactccgaagactgcagaaggccctttgcttggatctcttgagcctgtcagctgcatgtgatgccttggaccagcacaacctcaagcaaaatgaccagcccatggatatcctgcagattattaattgtttgaccactatttatgaccgcctggagcaagagcacaacaatttggtcaacgtccctctctgcgtggatatgtgtctgaactggctgctgaatgtttatgatacgggacgaacagggaggatccgtgtcctgtcttttaaaactggcatcatttccctgtgtaaagcacatttggaagacaagtacagataccttttcaagcaagtggcaagttcaacaggattttgtgaccagcgcaggctgggcctccttctgcatgattctatccaaattccaagacagttgggtgaagttgcatcctttgggggcagtaacattgagccaagtgtccggagctgcttccaatttgctaataataagccagagatcgaagcggccctcttcctagactggatgagactggaaccccagtccatggtgtggctgcccgtcctgcacagagtggctgctgcagaaactgccaagcatcaggccaaatgtaacatctgcaaagagtgtccaatcattggattcaggtacaggagtctaaagcactttaattatgacatctgccaaagctgctttttttctggtcgagttgcaaaaggccataaaatgcactatcccatggtggaatattgcactccgactacatcaggagaagatgttcgagactttgccaaggtactaaaaaacaaatttcgaaccaaaaggtattttgcgaagcatccccgaatgggctacctgccagtgcagactgtcttagagggggacaacatggaaactcccgttactctgatcaacttctggccagtagattctgcgcctgcctcgtcccctcagctttcacacgatgatactcattcacgcattgaacattatgctagcaggctagcagaaatggaaaacagcaatggatcttatctaaatgatagcatctctcctaatgagagcatagatgatgaacatttgttaatccagcattactgccaaagtttgaaccaggactcccccctgagccagcctcgtagtcctgcccagatcttgatttccttagagagtgaggaaagaggggagctagagagaatcctagcagatcttgaggaagaaaacaggaatctgcaagcagaatatgaccgtctaaagcagcagcacgaacataaaggcctgtccccactgccgtcccctcctgaaatgatgcccacctctccccagagtccccgggatgctgagctcattgctgaggccaagctactgcgtcaacacaaaggccgcctggaagccaggatgcaaatcctggaagaccacaataaacagctggagtcacagttacacaggctaaggcagctgctggagcaaccccaggcagaggccaaagtgaatggcacaacggtgtcctctccttctacctctctacagaggtccgacagcagtcagcctatgctgctccgagtggttggcagtcaaacttcggactccatgggtgaggaagatcttctcagtcctccccaggacacaagcacagggttagaggaggtgatggagcaactcaacaactccttccctagttcaagaggaagaaatacccctggaaagccaatgagagaggacacaatgtag

SEQ ID NO: 12 - protein, 2488 aa, Artificial Sequence
  Nucleotide Sequence of proposed truncated Dystrophin-VSV-G chimeric protein without cleavage site with VSV-G at N-terminal
  MISC_FEATURE (1)..(2488)
MKCLLYLAFLFIGVNCKFTIVFPHNQKGNWKNVPSNYHYCPSSSDLNWHNDLIGTALQVKMPKSHKAIQADGWMCHASKWVTTCDFRWYGPKYITHSIRSFTPSVEQCKESIEQTKQGTWLNPGFPPQSCGYATVTDAEAAIVQVTPHHVLVDEYTGEWVDSQFINGKCSNDICPTVHNSTTWHSDYKVKGLCDSNLISTDITFFSEDGELSSLGKEGTGFRSNYFAYETGDKACKMQYCKHWGVRLPSGVWFEMADKDLFAAARFPECPEGSSISAPSQTSVDVSLIQDVERILDYSLCQETWSKIRAGLPISPVDLSYLAPKNPGTGPVFTIINGTLKYFETRYIRVDIAAPILSRMVGMISGTTTERELWDDWAPYEDVEIGPNGVLRTSLGYKFPLYMIGHGMLDSDLHLSSKAQVFEHPHIQDAASQLPDDETLFFGDTGLSKNPIEFVEGWFSSWKSSIASFFFIIGLIIGLFLVLRVGIYLCIKLKHTKKRQIYTDIEMNWWEEVEDCYEREDVQKKTFTKWVNAQFSKFGKQHIENLFSDLQDGRRLLDLLEGLTGQKLPKEKGSTRVHALNNVNKALRVLQNNNVDLVNIGSTDIVDGNHKLTLGLIWNIILHWQVKNVMKNIMAGLQQTNSEKILLSWVRQSTRNYPQVNVINFTTSWSDGLALNALIHSHRPDLFDWNSVVCQQSATQRLEHAFNIARYQLGIEKLLDPEDVDTTYPDKKSILMYITSLFQVLPQQVSIEAIQEVEMLPRPPKVTKEEHFQLHHQMHYSQQITVSLAQGYERTSSPKPRFKSYAYTQAAYVTTSDPTRSPFPSQHLEAPEDKSFGSSLMESEVNLDRYQTALEEVLSWLLSAEDTLQAQGEISNDVEVVKDQFHTHEGYMMDLTAHQGRVGNILQLGSKLIGTGKLSEDEETEVQEQMNLLNSRWECLRVASMEKQSNLHRVLMDLQNQKLKELNDWLTKTEERTRKMEEEPLGPDLEDLKRQVQQHKVLQEDLEQEQVRVNSLTHMVVVVDESSGDHATAALEEQLKVLGDRWANICRWTEDRWVLLQDILLKWQRLTEEQCLFSAWLSEKEDAVNKIHTTGFKDQNEMLSSLQKLAVLKADLEKKKQSMGKLYSLKQDLLSTLKNKSVTQKTEAWLDNFARCWDNLVQKLEKSTAQETEIAVQAKQPDVEEILSKGQHLYKEKPATQPVKRKLEDLSSEWKAVNRLLQELRAKQPDLAPGLTTIGASPTQTVTLVTQPVVTKETAISKLEMPSSLMLEVPALADFNRAWTELTDWLSLLDQVIKSQRVMVGDLEDINEMIIKQKATMQDLEQRRPQLEELITAAQNLKNKTSNQEARTIITDRIERIQNQWDEVQEHLQNRRQQLNEMLKDSTQWLEAKEEAEQVLGQARAKLESWKEGPYTVDAIQKKITETKQLAKDLRQWQTNVDVANDLALKLLRDYSADDTRKVHMITENINASWRSIHKRVSEREAALEETHRLLQQFPLDLEKFLAWLTEAETTANVLQDATRKERLLEDSKGVKELMKQWQDLQGEIEAHTDVYHNLDENSQKILRSLEGSDDAVLLQRRLDNMNFKWSELRKKSLNIRSHLEASSDQWKRLHLSLQELLVWLQLKDDELSRQAPIGGDFPAVQKQNDVHRAFKRELKTKEPVIMSTLETVRIFLTEQPLEGLEKLYQEPRELPPEERAQNVTRLLRKQAEEVNTEWEKLNLHSADWQRKIDETLERLQELQEATDELDLKLRQAEVIKGSWQPVGDLLIDSLQDHLEKVKALRGEIAPLKENVSHVNDLARQLTTLGIQLSPYNLSTLEDLNTRWKLLQVAVEDRVRQLHEAHRDFGPASQHFLSTSVQGPWERAISPNKVPYYINHETQTTCWDHPKMTELYQSLADLNNVRFSAYRTAMKLRRLQKALCLDLLSLSAACDALDQHNLKQNDQPMDILQIINCLTTIYDRLEQEHNNLVNVPLCVDMCLNWLLNVYDTGRTGRIRVLSFKTGIISLCKAHLEDKYRYLFKQVASSTGFCDQRRLGLLLHDSIQIPRQLGEVASFGGSNIEPSVRSCFQFANNKPEIEAALFLDWMRLEPQSMVWLPVLHRVAAAETAKHQAKCNICKECPIIGFRYRSLKHFNYDICQSCFFSGRVAKGHKMHYPMVEYCTPTTSGEDVRDFAKVLKNKFRTKRYFAKHPRMGYLPVQTVLEGDNMETPVTLINFWPVDSAPASSPQLSHDDTHSRIEHYASRLAEMENSNGSYLNDSISPNESIDDEHLLIQHYCQSLNQDSPLSQPRSPAQILISLESEERGELERILADLEEENRNLQAEYDRLKQQHEHKGLSPLPSPPEMMPTSPQSPRDAELIAEAKLLRQHKGRLEARMQILEDHNKQLESQLHRLRQLLEQPQAEAKVNGTTVSSPSTSLQRSDSSQPMLLRVVGSQTSDSMGEEDLLSPPQDTSTGLEEVMEQLNNSFPSSRGRNTPGKPMREDTM

SEQ ID NO: 13 - DNA, 11109 bp, Artificial Sequence
  penetratin-dystrophin fusion protein nucleotide sequence
  misc_feature (1)..(11109)
atgcgccagatcaagatctacttccagaaccgccgcatgaaatggaaaaaaatgctttggtgggaagaagtagaggactgttatgaaagagaagatgttcaaaagaaaacattcacaaaatgggtaaatgcacaattttctaagtttgggaagcagcatattgagaacctcttcagtgacctacaggatgggaggcgcctcctagacctcctcgaaggcctgacagggcaaaaactgccaaaagaaaaaggatccacaagagttcatgccctgaacaatgtcaacaaggcactgcgggttttgcagaacaataatgttgatttagtgaatattggaagtactgacatcgtagatggaaatcataaactgactcttggtttgatttggaatataatcctccactggcaggtcaaaaatgtaatgaaaaatatcatggctggattgcaacaaaccaacagtgaaaagattctcctgagctgggtccgacaatcaactcgtaattatccacaggttaatgtaatcaacttcaccaccagctggtctgatggcctggctttgaatgctctcatccatagtcataggccagacctatttgactggaatagtgtggtttgccagcagtcagccacacaacgactggaacatgcattcaacatcgccagatatcaattaggcatagagaaactactcgatcctgaagatgttgataccacctatccagataagaagtccatcttaatgtacatcacatcactcttccaagttttgcctcaacaagtgagcattgaagccatccaggaagtggaaatgttgccaaggccacctaaagtgactaaagaagaacattttcagttacatcatcaaatgcactattctcaacagatcacggtcagtctagcacagggatatgagagaacttcttcccctaagcctcgattcaagagctatgcctacacacaggctgcttatgtcaccacctctgaccctacacggagcccatttccttcacagcatttggaagctcctgaagacaagtcatttggcagttcattgatggagagtgaagtaaacctggaccgttatcaaacagctttagaagaagtattatcgtggcttctttctgctgaggacacattgcaagcacaaggagagatttctaatgatgtggaagtggtgaaagaccagtttcatactcatgaggggtacatgatggatttgacagcccatcagggccgggttggtaatattctacaattgggaagtaagctgattggaacaggaaaattatcagaagatgaagaaactgaagtacaagagcagatgaatctcctaaattcaagatgggaatgcctcagggtagctagcatggaaaaacaaagcaatttacatagagttttaatggatctccagaatcagaaactgaaagagttgaatgactggctaacaaaaacagaagaaagaacaaggaaaatggaggaagagcctcttggacctgatcttgaagacctaaaacgccaagtacaacaacataaggtgcttcaagaagatctagaacaagaacaagtcagggtcaattctctcactcacatggtggtggtagttgatgaatctagtggagatcacgcaactgctgctttggaagaacaacttaaggtattgggagatcgatgggcaaacatctgtagatggacagaagaccgctgggttcttttacaagacatccttctcaaatggcaacgtcttactgaagaacagtgcctttttagtgcatggctttcagaaaaagaagatgcagtgaacaagattcacacaactggctttaaagatcaaaatgaaatgttatcaagtcttcaaaaactggccgttttaaaagcggatctagaaaagaaaaagcaatccatgggcaaactgtattcactcaaacaagatcttctttcaacactgaagaataagtcagtgacccagaagacggaagcatggctggataactttgcccggtgttgggataatttagtccaaaaacttgaaaagagtacagcacagatttcacaggctgtcaccaccactcagccatcactaacacagacaactgtaatggaaacagtaactacggtgaccacaagggaacagatcctggtaaagcatgctcaagaggaacttccaccaccacctccccaaaagaagaggcagattactgtggattctgaaattaggaaaaggttggatgttgatataactgaacttcacagctggattactcgctcagaagctgtgttgcagagtcctgaatttgcaatctttcggaaggaaggcaacttctcagacttaaaagaaaaagtcaatgccatagagcgagaaaaagctgagaagttcagaaaactgcaagatgccagcagatcagctcaggccctggtggaacagatggtgaatgagggtgttaatgcagatagcatcaaacaagcctcagaacaactgaacagccggtggatcgaattctgccagttgctaagtgagagacttaactggctggagtatcagaacaacatcatcgctttctataatcagctacaacaattggagcagatgacaactactgctgaaaactggttgaaaatccaacccaccaccccatcagagccaacagcaattaaaagtcagttaaaaatttgtaaggatgaagtcaaccggctatcaggtcttcaacctcaaattgaacgattaaaaattcaaagcatagccctgaaagagaaaggacaaggacccatgttcctggatgcagactttgtggcctttacaaatcattttaagcaagtcttttctgatgtgcaggccagagagaaagagctacagacaatttttgacactttgccaccaatgcgctatcaggagaccatgagtgccatcaggacatgggtccagcagtcagaaaccaaactctccatacctcaacttagtgtcaccgactatgaaatcatggagcagagactcggggaattgcaggctttacaaagttctctgcaagagcaacaaagtggcctatactatctcagcaccactgtgaaagagatgtcgaagaaagcgccctctgaaattagccggaaatatcaatcagaatttgaagaaattgagggacgctggaagaagctctcctcccagctggttgagcattgtcaaaagctagaggagcaaatgaataaactccgaaaaattcagaatcacatacaaaccctgaagaaatggatggctgaagttgatgtttttctgaaggaggaatggcctgcccttggggattcagaaattctaaaaaagcagctgaaacagtgcagacttttagtcagtgatattcagacaattcagcccagtctaaacagtgtcaatgaaggtgggcagaagataaagaatgaagcagagccagagtttgcttcgagacttgagacagaactcaaagaacttaacactcagtgggatcacatgtgccaacaggtctatgccagaaaggaggccttgaagggaggtttggagaaaactgtaagcctccagaaagatctatcagagatgcacgaatggatgacacaagctgaagaagagtatcttgagagagattttgaatataaaactccagatgaattacagaaagcagttgaagagatgaagagagctaaagaagaggcccaacaaaaagaagcgaaagtgaaactccttactgagtctgtaaatagtgtcatagctcaagctccacctgtagcacaagaggccttaaaaaaggaacttgaaactctaaccaccaactaccagtggctctgcactaggctgaatgggaaatgcaagactttggaagaagtttgggcatgttggcatgagttattgtcatacttggagaaagcaaacaagtggctaaatgaagtagaatttaaacttaaaaccactgaaaacattcctggcggagctgaggaaatctctgaggtgctagattcacttgaaaatttgatgcgacattcagaggataacccaaatcagattcgcatattggcacagaccctaacagatggcggagtcatggatgagctaatcaatgaggaacttgagacatttaattctcgttggagggaactacatgaagaggctgtaaggaggcaaaagttgcttgaacagagcatccagtctgcccaggagactgaaaaatccttacacttaatccaggagtccctcacattcattgacaagcagttggcagcttatattgcagacaaggtggacgcagctcaaatgcctcaggaagcccagaaaatccaatctgatttgacaagtcatgagatcagtttagaagaaatgaagaaacataatcaggggaaggaggctgcccaaagagtcctgtctcagattgatgttgcacagaaaaaattacaagatgtctccatgaagtttcgattattccagaaaccagccaattttgagctgcgtctacaagaaagtaagatgattttagatgaagtgaagatgcacttgcctgcattggaaacaaagagtgtggaacaggaagtagtacagtcacagctaaatcattgtgtgaacttgtataaaagtctgagtgaagtgaagtctgaagtggaaatggtgataaagactggacgtcagattgtacagaaaaagcagacggaaaatcccaaagaacttgatgaaagagtaacagctttgaaattgcattataatgagctgggagcaaaggtaacagaaagaaagcaacagttggagaaatgcttgaaattgtcccgtaagatgcgaaaggaaatgaatgtcttgacagaatggctggcagctacagatatggaattgacaaagagatcagcagttgaaggaatgcctagtaatttggattctgaagttgcctggggaaaggctactcaaaaagagattgagaaacagaaggtgcacctgaagagtatcacagaggtaggagaggccttgaaaacagttttgggcaagaaggagacgttggtggaagataaactcagtcttctgaatagtaactggatagctgtcacctcccgagcagaagagtggttaaatcttttgttggaataccagaaacacatggaaacttttgaccagaatgtggaccacatcacaaagtggatcattcaggctgacacacttttggatgaatcagagaaaaagaaaccccagcaaaaagaagacgtgcttaagcgtttaaaggcagaactgaatgacatacgcccaaaggtggactctacacgtgaccaagcagcaaacttgatggcaaaccgcggtgaccactgcaggaaattagtagagccccaaatctcagagctcaaccatcgatttgcagccatttcacacagaattaagactggaaaggcctccattcctttgaaggaattggagcagtttaactcagatatacaaaaattgcttgaaccactggaggctgaaattcagcagggggtgaatctgaaagaggaagacttcaataaagatatgaatgaagacaatgagggtactgtaaaagaattgttgcaaagaggagacaacttacaacaaagaatcacagatgagagaaagagagaggaaataaagataaaacagcagctgttacagacaaaacataatgctctcaaggatttgaggtctcaaagaagaaaaaaggctctagaaatttctcatcagtggtatcagtacaagaggcaggctgatgatctcctgaaatgcttggatgacattgaaaaaaaattagccagcctacctgagcccagagatgaaaggaaaataaaggaaattgatcgggaattgcagaagaagaaagaggagctgaatgcagtgcgtaggcaagctgagggcttgtctgaggatggggccgcaatggcagtggagccaactcagatccagctcagcaagcgctggcgggaaattgagagcaaatttgctcagtttcgaagactcaactttgcacaaattcacactgtccgtgaagaaacgatgatggtgatgactgaagacatgcctttggaaatttcttatgtgccttctacttatttgactgaaatcactcatgtctcacaagccctattagaagtggaacaacttctcaatgctcctgacctctgtgctaaggactttgaagatctctttaagcaagaggagtctctgaagaatataaaagatagtctacaacaaagctcaggtcggattgacattattcatagcaagaagacagcagcattgcaaagtgcaacgcctgtggaaagggtgaagctacaggaagctctctcccagcttgatttccaatgggaaaaagttaacaaaatgtacaaggaccgacaagggcgatttgacagatctgttgagaaatggcggcgttttcattatgatataaagatatttaatcagtggctaacagaagctgaacagtttctcagaaagacacaaattcctgagaattgggaacatgctaaatacaaatggtatcttaaggaactccaggatggcattgggcagcggcaaactgttgtcagaacattgaatgcaactggggaagaaataattcagcaatcctcaaaaacagatgccagtattctacaggaaaaattgggaagcctgaatctgcggtggcaggaggtctgcaaacagctgtcagacagaaaaaagaggctagaagaacaaaagaatatcttgtcagaatttcaaagagatttaaatgaatttgttttatggttggaggaagcagataacattgctagtatcccacttgaacctggaaaagagcagcaactaaaagaaaagcttgagcaagtcaagttactggtggaagagttgcccctgcgccagggaattctcaaacaattaaatgaaactggaggacccgtgcttgtaagtgctcccataagcccagaagagcaagataaacttgaaaataagctcaagcagacaaatctccagtggataaaggtttccagagctttacctgagaaacaaggagaaattgaagctcaaataaaagaccttgggcagcttgaaaaaaagcttgaagaccttgaagagcagttaaatcatctgctgctgtggttatctcctattaggaatcagttggaaatttataaccaaccaaaccaagaaggaccatttgacgttcaggaaactgaaatagcagttcaagctaaacaaccggatgtggaagagattttgtctaaagggcagcatttgtacaaggaaaaaccagccactcagccagtgaagaggaagttagaagatctgagctctgagtggaaggcggtaaaccgtttacttcaagagctgagggcaaagcagcctgacctagctcctggactgaccactattggagcctctcctactcagactgttactctggtgacacaacctgtggttactaaggaaactgccatctccaaactagaaatgccatcttccttgatgttggaggtacctgctctggcagatttcaaccgggcttggacagaacttaccgactggctttctctgcttgatcaagttataaaatcacagagggtgatggtgggtgaccttgaggatatcaacgagatgatcatcaagcagaaggcaacaatgcaggatttggaacagaggcgtccccagttggaagaactcattaccgctgcccaaaatttgaaaaacaagaccagcaatcaagaggctagaacaatcattacggatcgaattgaaagaattcagaatcagtgggatgaagtacaagaacaccttcagaaccggaggcaacagttgaatgaaatgttaaaggattcaacacaatggctggaagctaaggaagaagctgagcaggtcttaggacaggccagagccaagcttgagtcatggaaggagggtccctatacagtagatgcaatccaaaagaaaatcacagaaaccaagcagttggccaaagacctccgccagtggcagacaaatgtagatgtggcaaatgacttggccctgaaacttctccgggattattctgcagatgataccagaaaagtccacatgataacagagaatatcaatgcctcttggagaagcattcataaaagggtgagtgagcgagaggctgctttggaagaaactcatagattactgcaacagttccccctggacctggaaaagtttcttgcctggcttacagaagctgaaacaactgccaatgtcctacaggatgctacccgtaaggaaaggctcctagaagactccaagggagtaaaagagctgatgaaacaatggcaagacctccaaggtgaaattgaagctcacacagatgtttatcacaacctggatgaaaacagccaaaaaatcctgagatccctggaaggttccgatgatgcagtcctgttacaaagacgtttggataacatgaacttcaagtggagtgaacttcggaaaaagtctctcaacattaggtcccatttggaagccagttctgaccagtggaagcgtctgcacctttctctgcaggaacttctggtgtggctacagctgaaagatgatgaattaagccggcaggcacctattggaggcgactttccagcagttcagaagcagaacgatgtacatagggccttcaagagggaattgaaaactaaagaacctgtaatcatgagtactcttgagactgtacgaatatttctgacagagcagcctttggaaggactagagaaactctaccaggagcccagagagctgcctcctgaggagagagcccagaatgtcactcggcttctacgaaagcaggctgaggaggtcaatactgagtgggaaaaattgaacctgcactccgctgactggcagagaaaaatagatgagacccttgaaagactccaggaacttcaagaggccacggatgagctggacctcaagctgcgccaagctgaggtgatcaagggatcctggcagcccgtgggcgatctcctcattgactctctccaagatcacctcgagaaagtcaaggcacttcgaggagaaattgcgcctctgaaagagaacgtgagccacgtcaatgaccttgctcgccagcttaccactttgggcattcagctctcaccgtataacctcagcactctggaagacctgaacaccagatggaagcttctgcaggtggccgtcgaggaccgagtcaggcagctgcatgaagcccacagggactttggtccagcatctcagcactttctttccacgtctgtccagggtccctgggagagagccatctcgccaaacaaagtgccctactatatcaaccacgagactcaaacaacttgctgggaccatcccaaaatgacagagctctaccagtctttagctgacctgaataatgtcagattctcagcttataggactgccatgaaactccgaagactgcagaaggccctttgcttggatctcttgagcctgtcagctgcatgtgatgccttggaccagcacaacctcaagcaaaatgaccagcccatggatatcctgcagattattaattgtttgaccactatttatgaccgcctggagcaagagcacaacaatttggtcaacgtccctctctgcgtggatatgtgtctgaactggctgctgaatgtttatgatacgggacgaacagggaggatccgtgtcctgtcttttaaaactggcatcatttccctgtgtaaagcacatttggaagacaagtacagataccttttcaagcaagtggcaagttcaacaggattttgtgaccagcgcaggctgggcctccttctgcatgattctatccaaattccaagacagttgggtgaagttgcatcctttgggggcagtaacattgagccaagtgtccggagctgcttccaatttgctaataataagccagagatcgaagcggccctcttcctagactggatgagactggaaccccagtccatggtgtggctgcccgtcctgcacagagtggctgctgcagaaactgccaagcatcaggccaaatgtaacatctgcaaagagtgtccaatcattggattcaggtacaggagtctaaagcactttaattatgacatctgccaaagctgctttttttctggtcgagttgcaaaaggccataaaatgcactatcccatggtggaatattgcactccgactacatcaggagaagatgttcgagactttgccaaggtactaaaaaacaaatttcgaaccaaaaggtattttgcgaagcatccccgaatgggctacctgccagtgcagactgtcttagagggggacaacatggaaactcccgttactctgatcaacttctggccagtagattctgcgcctgcctcgtcccctcagctttcacacgatgatactcattcacgcattgaacattatgctagcaggctagcagaaatggaaaacagcaatggatcttatctaaatgatagcatctctcctaatgagagcatagatgatgaacatttgttaatccagcattactgccaaagtttgaaccaggactcccccctgagccagcctcgtagtcctgcccagatcttgatttccttagagagtgaggaaagaggggagctagagagaatcctagcagatcttgaggaagaaaacaggaatctgcaagcagaatatgaccgtctaaagcagcagcacgaacataaaggcctgtccccactgccgtcccctcctgaaatgatgcccacctctccccagagtccccgggatgctgagctcattgctgaggccaagctactgcgtcaacacaaaggccgcctggaagccaggatgcaaatcctggaagaccacaataaacagctggagtcacagttacacaggctaaggcagctgctggagcaaccccaggcagaggccaaagtgaatggcacaacggtgtcctctccttctacctctctacagaggtccgacagcagtcagcctatgctgctccgagtggttggcagtcaaacttcggactccatgggtgaggaagatcttctcagtcctccccaggacacaagcacagggttagaggaggtgatggagcaactcaacaactccttccctagttcaagaggaagaaatacccctggaaagccaatgagagaggacacaatgtag

SEQ ID NO: 14 - protein, 3702 aa, Artificial Sequence
  Penetratin-dystrophin fusion protein amino acid sequence
  MISC_FEATURE (1)..(3702)
MRQIKIYFQNRRMKWKKMLWWEEVEDCYEREDVQKKTFTKWVNAQFSKFGKQHIENLFSDLQDGRRLLDLLEGLTGQKLPKEKGSTRVHALNNVNKALRVLQNNNVDLVNIGSTDIVDGNHKLTLGLIWNIILHWQVKNVMKNIMAGLQQTNSEKILLSWVRQSTRNYPQVNVINFTTSWSDGLALNALIHSHRPDLFDWNSVVCQQSATQRLEHAFNIARYQLGIEKLLDPEDVDTTYPDKKSILMYITSLFQVLPQQVSIEAIQEVEMLPRPPKVTKEEHFQLHHQMHYSQQITVSLAQGYERTSSPKPRFKSYAYTQAAYVTTSDPTRSPFPSQHLEAPEDKSFGSSLMESEVNLDRYQTALEEVLSWLLSAEDTLQAQGEISNDVEVVKDQFHTHEGYMMDLTAHQGRVGNILQLGSKLIGTGKLSEDEETEVQEQMNLLNSRWECLRVASMEKQSNLHRVLMDLQNQKLKELNDWLTKTEERTRKMEEEPLGPDLEDLKRQVQQHKVLQEDLEQEQVRVNSLTHMVVVVDESSGDHATAALEEQLKVLGDRWANICRWTEDRWVLLQDILLKWQRLTEEQCLFSAWLSEKEDAVNKIHTTGFKDQNEMLSSLQKLAVLKADLEKKKQSMGKLYSLKQDLLSTLKNKSVTQKTEAWLDNFARCWDNLVQKLEKSTAQISQAVTTTQPSLTQTTVMETVTTVTTREQILVKHAQEELPPPPPQKKRQITVDSEIRKRLDVDITELHSWITRSEAVLQSPEFAIFRKEGNFSDLKEKVNAIEREKAEKFRKLQDASRSAQALVEQMVNEGVNADSIKQASEQLNSRWIEFCQLLSERLNWLEYQNNIIAFYNQLQQLEQMTTTAENWLKIQPTTPSEPTAIKSQLKICKDEVNRLSGLQPQIERLKIQSIALKEKGQGPMFLDADFVAFTNHFKQVFSDVQAREKELQTIFDTLPPMRYQETMSAIRTWVQQSETKLSIPQLSVTDYEIMEQRLGELQALQSSLQEQQSGLYYLSTTVKEMSKKAPSEISRKYQSEFEEIEGRWKKLSSQLVEHCQKLEEQMNKLRKIQNHIQTLKKWMAEVDVFLKEEWPALGDSEILKKQLKQCRLLVSDIQTIQPSLNSVNEGGQKIKNEAEPEFASRLETELKELNTQWDHMCQQVYARKEALKGGLEKTVSLQKDLSEMHEWMTQAEEEYLERDFEYKTPDELQKAVEEMKRAKEEAQQKEAKVKLLTESVNSVIAQAPPVAQEALKKELETLTTNYQWLCTRLNGKCKTLEEVWACWHELLSYLEKANKWLNEVEFKLKTTENIPGGAEEISEVLDSLENLMRHSEDNPNQIRILAQTLTDGGVMDELINEELETFNSRWRELHEEAVRRQKLLEQSIQSAQETEKSLHLIQESLTFIDKQLAAYIADKVDAAQMPQEAQKIQSDLTSHEISLEEMKKHNQGKEAAQRVLSQIDVAQKKLQDVSMKFRLFQKPANFELRLQESKMILDEVKMHLPALETKSVEQEVVQSQLNHCVNLYKSLSEVKSEVEMVIKTGRQIVQKKQTENPKELDERVTALKLHYNELGAKVTERKQQLEKCLKLSRKMRKEMNVLTEWLAATDMELTKRSAVEGMPSNLDSEVAWGKATQKEIEKQKVHLKSITEVGEALKTVLGKKETLVEDKLSLLNSNWIAVTSRAEEWLNLLLEYQKHMETFDQNVDHITKWIIQADTLLDESEKKKPQQKEDVLKRLKAELNDIRPKVDSTRDQAANLMANRGDHCRKLVEPQISELNHRFAAISHRIKTGKASIPLKELEQFNSDIQKLLEPLEAEIQQGVNLKEEDFNKDMNEDNEGTVKELLQRGDNLQQRITDERKREEIKIKQQLLQTKHNALKDLRSQRRKKALEISHQWYQYKRQADDLLKCLDDIEKKLASLPEPRDERKIKEIDRELQKKKEELNAVRRQAEGLSEDGAAMAVEPTQIQLSKRWREIESKFAQFRRLNFAQIHTVREETMMVMTEDMPLEISYVPSTYLTEITHVSQALLEVEQLLNAPDLCAKDFEDLFKQEESLKNIKDSLQQSSGRIDIIHSKKTAALQSATPVERVKLQEALSQLDFQWEKVNKMYKDRQGRFDRSVEKWRRFHYDIKIFNQWLTEAEQFLRKTQIPENWEHAKYKWYLKELQDGIGQRQTVVRTLNATGEEIIQQSSKTDASILQEKLGSLNLRWQEVCKQLSDRKKRLEEQKNILSEFQRDLNEFVLWLEEADNIASIPLEPGKEQQLKEKLEQVKLLVEELPLRQGILKQLNETGGPVLVSAPISPEEQDKLENKLKQTNLQWIKVSRALPEKQGEIEAQIKDLGQLEKKLEDLEEQLNHLLLWLSPIRNQLEIYNQPNQEGPFDVQETEIAVQAKQPDVEEILSKGQHLYKEKPATQPVKRKLEDLSSEWKAVNRLLQELRAKQPDLAPGLTTIGASPTQTVTLVTQPVVTKETAISKLEMPSSLMLEVPALADFNRAWTELTDWLSLLDQVIKSQRVMVGDLEDINEMIIKQKATMQDLEQRRPQLEELITAAQNLKNKTSNQEARTIITDRIERIQNQWDEVQEHLQNRRQQLNEMLKDSTQWLEAKEEAEQVLGQARAKLESWKEGPYTVDAIQKKITETKQLAKDLRQWQTNVDVANDLALKLLRDYSADDTRKVHMITENINASWRSIHKRVSEREAALEETHRLLQQFPLDLEKFLAWLTEAETTANVLQDATRKERLLEDSKGVKELMKQWQDLQGEIEAHTDVYHNLDENSQKILRSLEGSDDAVLLQRRLDNMNFKWSELRKKSLNIRSHLEASSDQWKRLHLSLQELLVWLQLKDDELSRQAPIGGDFPAVQKQNDVHRAFKRELKTKEPVIMSTLETVRIFLTEQPLEGLEKLYQEPRELPPEERAQNVTRLLRKQAEEVNTEWEKLNLHSADWQRKIDETLERLQELQEATDELDLKLRQAEVIKGSWQPVGDLLIDSLQDHLEKVKALRGEIAPLKENVSHVNDLARQLTTLGIQLSPYNLSTLEDLNTRWKLLQVAVEDRVRQLHEAHRDFGPASQHFLSTSVQGPWERAISPNKVPYYINHETQTTCWDHPKMTELYQSLADLNNVRFSAYRTAMKLRRLQKALCLDLLSLSAACDALDQHNLKQNDQPMDILQIINCLTTIYDRLEQEHNNLVNVPLCVDMCLNWLLNVYDTGRTGRIRVLSFKTGIISLCKAHLEDKYRYLFKQVASSTGFCDQRRLGLLLHDSIQIPRQLGEVASFGGSNIEPSVRSCFQFANNKPEIEAALFLDWMRLEPQSMVWLPVLHRVAAAETAKHQAKCNICKECPIIGFRYRSLKHFNYDICQSCFFSGRVAKGHKMHYPMVEYCTPTTSGEDVRDFAKVLKNKFRTKRYFAKHPRMGYLPVQTVLEGDNMETPVTLINFWPVDSAPASSPQLSHDDTHSRIEHYASRLAEMENSNGSYLNDSISPNESIDDEHLLIQHYCQSLNQDSPLSQPRSPAQILISLESEERGELERILADLEEENRNLQAEYDRLKQQHEHKGLSPLPSPPEMMPTSPQSPRDAELIAEAKLLRQHKGRLEARMQILEDHNKQLESQLHRLRQLLEQPQAEAKVNGTTVSSPSTSLQRSDSSQPMLLRVVGSQTSDSMGEEDLLSPPQDTSTGLEEVMEQLNNSFPSSRGRNTPGKPMREDTM

SEQ ID NO: 15 - DNA, 11316 bp, Artificial Sequence
  Tat-dystrophin fusion protein nucleotide sequence
  misc_feature (1)..(11316)
atggagccagtagatcctagactagagccctggaagcaccctggaagtcagcctaaaactgcatgcaccaattgctattgtaaaaagtgttgctttcattgccaagtttgtttcataacaaaggccttaggcatctcctatggcaggaagaagcggagacagcgacgaagagctcctcaaggcagtcagactcatcaagtaagcttatcaaagcaacccacctcccaatcccgaggggacccgacaggcccgaaggaaatgctttggtgggaagaagtagaggactgttatgaaagagaagatgttcaaaagaaaacattcacaaaatgggtaaatgcacaattttctaagtttgggaagcagcatattgagaacctcttcagtgacctacaggatgggaggcgcctcctagacctcctcgaaggcctgacagggcaaaaactgccaaaagaaaaaggatccacaagagttcatgccctgaacaatgtcaacaaggcactgcgggttttgcagaacaataatgttgatttagtgaatattggaagtactgacatcgtagatggaaatcataaactgactcttggtttgatttggaatataatcctccactggcaggtcaaaaatgtaatgaaaaatatcatggctggattgcaacaaaccaacagtgaaaagattctcctgagctgggtccgacaatcaactcgtaattatccacaggttaatgtaatcaacttcaccaccagctggtctgatggcctggctttgaatgctctcatccatagtcataggccagacctatttgactggaatagtgtggtttgccagcagtcagccacacaacgactggaacatgcattcaacatcgccagatatcaattaggcatagagaaactactcgatcctgaagatgttgataccacctatccagataagaagtccatcttaatgtacatcacatcactcttccaagttttgcctcaacaagtgagcattgaagccatccaggaagtggaaatgttgccaaggccacctaaagtgactaaagaagaacattttcagttacatcatcaaatgcactattctcaacagatcacggtcagtctagcacagggatatgagagaacttcttcccctaagcctcgattcaagagctatgcctacacacaggctgcttatgtcaccacctctgaccctacacggagcccatttccttcacagcatttggaagctcctgaagacaagtcatttggcagttcattgatggagagtgaagtaaacctggaccgttatcaaacagctttagaagaagtattatcgtggcttctttctgctgaggacacattgcaagcacaaggagagatttctaatgatgtggaagtggtgaaagaccagtttcatactcatgaggggtacatgatggatttgacagcccatcagggccgggttggtaatattctacaattgggaagtaagctgattggaacaggaaaattatcagaagatgaagaaactgaagtacaagagcagatgaatctcctaaattcaagatgggaatgcctcagggtagctagcatggaaaaacaaagcaatttacatagagttttaatggatctccagaatcagaaactgaaagagttgaatgactggctaacaaaaacagaagaaagaacaaggaaaatggaggaagagcctcttggacctgatcttgaagacctaaaacgccaagtacaacaacataaggtgcttcaagaagatctagaacaagaacaagtcagggtcaattctctcactcacatggtggtggtagttgatgaatctagtggagatcacgcaactgctgctttggaagaacaacttaaggtattgggagatcgatgggcaaacatctgtagatggacagaagaccgctgggttcttttacaagacatccttctcaaatggcaacgtcttactgaagaacagtgcctttttagtgcatggctttcagaaaaagaagatgcagtgaacaagattcacacaactggctttaaagatcaaaatgaaatgttatcaagtcttcaaaaactggccgttttaaaagcggatctagaaaagaaaaagcaatccatgggcaaactgtattcactcaaacaagatcttctttcaacactgaagaataagtcagtgacccagaagacggaagcatggctggataactttgcccggtgttgggataatttagtccaaaaacttgaaaagagtacagcacagatttcacaggctgtcaccaccactcagccatcactaacacagacaactgtaatggaaacagtaactacggtgaccacaagggaacagatcctggtaaagcatgctcaagaggaacttccaccaccacctccccaaaagaagaggcagattactgtggattctgaaattaggaaaaggttggatgttgatataactgaacttcacagctggattactcgctcagaagctgtgttgcagagtcctgaatttgcaatctttcggaaggaaggcaacttctcagacttaaaagaaaaagtcaatgccatagagcgagaaaaagctgagaagttcagaaaactgcaagatgccagcagatcagctcaggccctggtggaacagatggtgaatgagggtgttaatgcagatagcatcaaacaagcctcagaacaactgaacagccggtggatcgaattctgccagttgctaagtgagagacttaactggctggagtatcagaacaacatcatcgctttctataatcagctacaacaattggagcagatgacaactactgctgaaaactggttgaaaatccaacccaccaccccatcagagccaacagcaattaaaagtcagttaaaaatttgtaaggatgaagtcaaccggctatcaggtcttcaacctcaaattgaacgattaaaaattcaaagcatagccctgaaagagaaaggacaaggacccatgttcctggatgcagactttgtggcctttacaaatcattttaagcaagtcttttctgatgtgcaggccagagagaaagagctacagacaatttttgacactttgccaccaatgcgctatcaggagaccatgagtgccatcaggacatgggtccagcagtcagaaaccaaactctccatacctcaacttagtgtcaccgactatgaaatcatggagcagagactcggggaattgcaggctttacaaagttctctgcaagagcaacaaagtggcctatactatctcagcaccactgtgaaagagatgtcgaagaaagcgccctctgaaattagccggaaatatcaatcagaatttgaagaaattgagggacgctggaagaagctctcctcccagctggttgagcattgtcaaaagctagaggagcaaatgaataaactccgaaaaattcagaatcacatacaaaccctgaagaaatggatggctgaagttgatgtttttctgaaggaggaatggcctgcccttggggattcagaaattctaaaaaagcagctgaaacagtgcagacttttagtcagtgatattcagacaattcagcccagtctaaacagtgtcaatgaaggtgggcagaagataaagaatgaagcagagccagagtttgcttcgagacttgagacagaactcaaagaacttaacactcagtgggatcacatgtgccaacaggtctatgccagaaaggaggccttgaagggaggtttggagaaaactgtaagcctccagaaagatctatcagagatgcacgaatggatgacacaagctgaagaagagtatcttgagagagattttgaatataaaactccagatgaattacagaaagcagttgaagagatgaagagagctaaagaagaggcccaacaaaaagaagcgaaagtgaaactccttactgagtctgtaaatagtgtcatagctcaagctccacctgtagcacaagaggccttaaaaaaggaacttgaaactctaaccaccaactaccagtggctctgcactaggctgaatgggaaatgcaagactttggaagaagtttgggcatgttggcatgagttattgtcatacttggagaaagcaaacaagtggctaaatgaagtagaatttaaacttaaaaccactgaaaacattcctggcggagctgaggaaatctctgaggtgctagattcacttgaaaatttgatgcgacattcagaggataacccaaatcagattcgcatattggcacagaccctaacagatggcggagtcatggatgagctaatcaatgaggaacttgagacatttaattctcgttggagggaactacatgaagaggctgtaaggaggcaaaagttgcttgaacagagcatccagtctgcccaggagactgaaaaatccttacacttaatccaggagtccctcacattcattgacaagcagttggcagcttatattgcagacaaggtggacgcagctcaaatgcctcaggaagcccagaaaatccaatctgatttgacaagtcatgagatcagtttagaagaaatgaagaaacataatcaggggaaggaggctgcccaaagagtcctgtctcagattgatgttgcacagaaaaaattacaagatgtctccatgaagtttcgattattccagaaaccagccaattttgagctgcgtctacaagaaagtaagatgattttagatgaagtgaagatgcacttgcctgcattggaaacaaagagtgtggaacaggaagtagtacagtcacagctaaatcattgtgtgaacttgtataaaagtctgagtgaagtgaagtctgaagtggaaatggtgataaagactggacgtcagattgtacagaaaaagcagacggaaaatcccaaagaacttgatgaaagagtaacagctttgaaattgcattataatgagctgggagcaaaggtaacagaaagaaagcaacagttggagaaatgcttgaaattgtcccgtaagatgcgaaaggaaatgaatgtcttgacagaatggctggcagctacagatatggaattgacaaagagatcagcagttgaaggaatgcctagtaatttggattctgaagttgcctggggaaaggctactcaaaaagagattgagaaacagaaggtgcacctgaagagtatcacagaggtaggagaggccttgaaaacagttttgggcaagaaggagacgttggtggaagataaactcagtcttctgaatagtaactggatagctgtcacctcccgagcagaagagtggttaaatcttttgttggaataccagaaacacatggaaacttttgaccagaatgtggaccacatcacaaagtggatcattcaggctgacacacttttggatgaatcagagaaaaagaaaccccagcaaaaagaagacgtgcttaagcgtttaaaggcagaactgaatgacatacgcccaaaggtggactctacacgtgaccaagcagcaaacttgatggcaaaccgcggtgaccactgcaggaaattagtagagccccaaatctcagagctcaaccatcgatttgcagccatttcacacagaattaagactggaaaggcctccattcctttgaaggaattggagcagtttaactcagatatacaaaaattgcttgaaccactggaggctgaaattcagcagggggtgaatctgaaagaggaagacttcaataaagatatgaatgaagacaatgagggtactgtaaaagaattgttgcaaagaggagacaacttacaacaaagaatcacagatgagagaaagagagaggaaataaagataaaacagcagctgttacagacaaaacataatgctctcaaggatttgaggtctcaaagaagaaaaaaggctctagaaatttctcatcagtggtatcagtacaagaggcaggctgatgatctcctgaaatgcttggatgacattgaaaaaaaattagccagcctacctgagcccagagatgaaaggaaaataaaggaaattgatcgggaattgcagaagaagaaagaggagctgaatgcagtgcgtaggcaagctgagggcttgtctgaggatggggccgcaatggcagtggagccaactcagatccagctcagcaagcgctggcgggaaattgagagcaaatttgctcagtttcgaagactcaactttgcacaaattcacactgtccgtgaagaaacgatgatggtgatgactgaagacatgcctttggaaatttcttatgtgccttctacttatttgactgaaatcactcatgtctcacaagccctattagaagtggaacaacttctcaatgctcctgacctctgtgctaaggactttgaagatctctttaagcaagaggagtctctgaagaatataaaagatagtctacaacaaagctcaggtcggattgacattattcatagcaagaagacagcagcattgcaaagtgcaacgcctgtggaaagggtgaagctacaggaagctctctcccagcttgatttccaatgggaaaaagttaacaaaatgtacaaggaccgacaagggcgatttgacagatctgttgagaaatggcggcgttttcattatgatataaagatatttaatcagtggctaacagaagctgaacagtttctcagaaagacacaaattcctgagaattgggaacatgctaaatacaaatggtatcttaaggaactccaggatggcattgggcagcggcaaactgttgtcagaacattgaatgcaactggggaagaaataattcagcaatcctcaaaaacagatgccagtattctacaggaaaaattgggaagcctgaatctgcggtggcaggaggtctgcaaacagctgtcagacagaaaaaagaggctagaagaacaaaagaatatcttgtcagaatttcaaagagatttaaatgaatttgttttatggttggaggaagcagataacattgctagtatcccacttgaacctggaaaagagcagcaactaaaagaaaagcttgagcaagtcaagttactggtggaagagttgcccctgcgccagggaattctcaaacaattaaatgaaactggaggacccgtgcttgtaagtgctcccataagcccagaagagcaagataaacttgaaaataagctcaagcagacaaatctccagtggataaaggtttccagagctttacctgagaaacaaggagaaattgaagctcaaataaaagaccttgggcagcttgaaaaaaagcttgaagaccttgaagagcagttaaatcatctgctgctgtggttatctcctattaggaatcagttggaaatttataaccaaccaaaccaagaaggaccatttgacgttcaggaaactgaaatagcagttcaagctaaacaaccggatgtggaagagattttgtctaaagggcagcatttgtacaaggaaaaaccagccactcagccagtgaagaggaagttagaagatctgagctctgagtggaaggcggtaaaccgtttacttcaagagctgagggcaaagcagcctgacctagctcctggactgaccactattggagcctctcctactcagactgttactctggtgacacaacctgtggttactaaggaaactgccatctccaaactagaaatgccatcttccttgatgttggaggtacctgctctggcagatttcaaccgggcttggacagaacttaccgactggctttctctgcttgatcaagttataaaatcacagagggtgatggtgggtgaccttgaggatatcaacgagatgatcatcaagcagaaggcaacaatgcaggatttggaacagaggcgtccccagttggaagaactcattaccgctgcccaaaatttgaaaaacaagaccagcaatcaagaggctagaacaatcattacggatcgaattgaaagaattcagaatcagtgggatgaagtacaagaacaccttcagaaccggaggcaacagttgaatgaaatgttaaaggattcaacacaatggctggaagctaaggaagaagctgagcaggtcttaggacaggccagagccaagcttgagtcatggaaggagggtccctatacagtagatgcaatccaaaagaaaatcacagaaaccaagcagttggccaaagacctccgccagtggcagacaaatgtagatgtggcaaatgacttggccctgaaacttctccgggattattctgcagatgataccagaaaagtccacatgataacagagaatatcaatgcctcttggagaagcattcataaaagggtgagtgagcgagaggctgctttggaagaaactcatagattactgcaacagttccccctggacctggaaaagtttcttgcctggcttacagaagctgaaacaactgccaatgtcctacaggatgctacccgtaaggaaaggctcctagaagactccaagggagtaaaagagctgatgaaacaatggcaagacctccaaggtgaaattgaagctcacacagatgtttatcacaacctggatgaaaacagccaaaaaatcctgagatccctggaaggttccgatgatgcagtcctgttacaaagacgtttggataacatgaacttcaagtggagtgaacttcggaaaaagtctctcaacattaggtcccatttggaagccagttctgaccagtggaagcgtctgcacctttctctgcaggaacttctggtgtggctacagctgaaagatgatgaattaagccggcaggcacctattggaggcgactttccagcagttcagaagcagaacgatgtacatagggccttcaagagggaattgaaaactaaagaacctgtaatcatgagtactcttgagactgtacgaatatttctgacagagcagcctttggaaggactagagaaactctaccaggagcccagagagctgcctcctgaggagagagcccagaatgtcactcggcttctacgaaagcaggctgaggaggtcaatactgagtgggaaaaattgaacctgcactccgctgactggcagagaaaaatagatgagacccttgaaagactccaggaacttcaagaggccacggatgagctggacctcaagctgcgccaagctgaggtgatcaagggatcctggcagcccgtgggcgatctcctcattgactctctccaagatcacctcgagaaagtcaaggcacttcgaggagaaattgcgcctctgaaagagaacgtgagccacgtcaatgaccttgctcgccagcttaccactttgggcattcagctctcaccgtataacctcagcactctggaagacctgaacaccagatggaagcttctgcaggtggccgtcgaggaccgagtcaggcagctgcatgaagcccacagggactttggtccagcatctcagcactttctttccacgtctgtccagggtccctgggagagagccatctcgccaaacaaagtgccctactatatcaaccacgagactcaaacaacttgctgggaccatcccaaaatgacagagctctaccagtctttagctgacctgaataatgtcagattctcagcttataggactgccatgaaactccgaagactgcagaaggccctttgcttggatctcttgagcctgtcagctgcatgtgatgccttggaccagcacaacctcaagcaaaatgaccagcccatggatatcctgcagattattaattgtttgaccactatttatgaccgcctggagcaagagcacaacaatttggtcaacgtccctctctgcgtggatatgtgtctgaactggctgctgaatgtttatgatacgggacgaacagggaggatccgtgtcctgtcttttaaaactggcatcatttccctgtgtaaagcacatttggaagacaagtacagataccttttcaagcaagtggcaagttcaacaggattttgtgaccagcgcaggctgggcctccttctgcatgattctatccaaattccaagacagttgggtgaagttgcatcctttgggggcagtaacattgagccaagtgtccggagctgcttccaatttgctaataataagccagagatcgaagcggccctcttcctagactggatgagactggaaccccagtccatggtgtggctgcccgtcctgcacagagtggctgctgcagaaactgccaagcatcaggccaaatgtaacatctgcaaagagtgtccaatcattggattcaggtacaggagtctaaagcactttaattatgacatctgccaaagctgctttttttctggtcgagttgcaaaaggccataaaatgcactatcccatggtggaatattgcactccgactacatcaggagaagatgttcgagactttgccaaggtactaaaaaacaaatttcgaaccaaaaggtattttgcgaagcatccccgaatgggctacctgccagtgcagactgtcttagagggggacaacatggaaactcccgttactctgatcaacttctggccagtagattctgcgcctgcctcgtcccctcagctttcacacgatgatactcattcacgcattgaacattatgctagcaggctagcagaaatggaaaacagcaatggatcttatctaaatgatagcatctctcctaatgagagcatagatgatgaacatttgttaatccagcattactgccaaagtttgaaccaggactcccccctgagccagcctcgtagtcctgcccagatcttgatttccttagagagtgaggaaagaggggagctagagagaatcctagcagatcttgaggaagaaaacaggaatctgcaagcagaatatgaccgtctaaagcagcagcacgaacataaaggcctgtccccactgccgtcccctcctgaaatgatgcccacctctccccagagtccccgggatgctgagctcattgctgaggccaagctactgcgtcaacacaaaggccgcctggaagccaggatgcaaatcctggaagaccacaataaacagctggagtcacagttacacaggctaaggcagctgctggagcaaccccaggcagaggccaaagtgaatggcacaacggtgtcctctccttctacctctctacagaggtccgacagcagtcagcctatgctgctccgagtggttggcagtcaaacttcggactccatgggtgaggaagatcttctcagtcctccccaggacacaagcacagggttagaggaggtgatggagcaactcaacaactccttccctagttcaagaggaagaaatacccctggaaagccaatgagagaggacacaatgtag

SEQ ID NO: 16 - protein, 3771 aa, Artificial Sequence
  Tat-dystrophin fusion protein amino acid sequence
  MISC_FEATURE (1)..(3771)
MEPVDPRLEPWKHPGSQPKTACTNCYCKKCCFHCQVCFITKALGISYGRKKRRQRRRAPQGSQTHQVSLSKQPTSQSRGDPTGPKEMLWWEEVEDCYEREDVQKKTFTKWVNAQFSKFGKQHIENLFSDLQDGRRLLDLLEGLTGQKLPKEKGSTRVHALNNVNKALRVLQNNNVDLVNIGSTDIVDGNHKLTLGLIWNIILHWQVKNVMKNIMAGLQQTNSEKILLSWVRQSTRNYPQVNVINFTTSWSDGLALNALIHSHRPDLFDWNSVVCQQSATQRLEHAFNIARYQLGIEKLLDPEDVDTTYPDKKSILMYITSLFQVLPQQVSIEAIQEVEMLPRPPKVTKEEHFQLHHQMHYSQQITVSLAQGYERTSSPKPRFKSYAYTQAAYVTTSDPTRSPFPSQHLEAPEDKSFGSSLMESEVNLDRYQTALEEVLSWLLSAEDTLQAQGEISNDVEVVKDQFHTHEGYMMDLTAHQGRVGNILQLGSKLIGTGKLSEDEETEVQEQMNLLNSRWECLRVASMEKQSNLHRVLMDLQNQKLKELNDWLTKTEERTRKMEEEPLGPDLEDLKRQVQQHKVLQEDLEQEQVRVNSLTHMVVVVDESSGDHATAALEEQLKVLGDRWANICRWTEDRWVLLQDILLKWQRLTEEQCLFSAWLSEKEDAVNKIHTTGFKDQNEMLSSLQKLAVLKADLEKKKQSMGKLYSLKQDLLSTLKNKSVTQKTEAWLDNFARCWDNLVQKLEKSTAQISQAVTTTQPSLTQTTVMETVTTVTTREQILVKHAQEELPPPPPQKKRQITVDSEIRKRLDVDITELHSWITRSEAVLQSPEFAIFRKEGNFSDLKEKVNAIEREKAEKFRKLQDASRSAQALVEQMVNEGVNADSIKQASEQLNSRWIEFCQLLSERLNWLEYQNNIIAFYNQLQQLEQMTTTAENWLKIQPTTPSEPTAIKSQLKICKDEVNRLSGLQPQIERLKIQSIALKEKGQGPMFLDADFVAFTNHFKQVFSDVQAREKELQTIFDTLPPMRYQETMSAIRTWVQQSETKLSIPQLSVTDYEIMEQRLGELQALQSSLQEQQSGLYYLSTTVKEMSKKAPSEISRKYQSEFEEIEGRWKKLSSQLVEHCQKLEEQMNKLRKIQNHIQTLKKWMAEVDVFLKEEWPALGDSEILKKQLKQCRLLVSDIQTIQPSLNSVNEGGQKIKNEAEPEFASRLETELKELNTQWDHMCQQVYARKEALKGGLEKTVSLQKDLSEMHEWMTQAEEEYLERDFEYKTPDELQKAVEEMKRAKEEAQQKEAKVKLLTESVNSVIAQAPPVAQEALKKELETLTTNYQWLCTRLNGKCKTLEEVWACWHELLSYLEKANKWLNEVEFKLKTTENIPGGAEEISEVLDSLENLMRHSEDNPNQIRILAQTLTDGGVMDELINEELETFNSRWRELHEEAVRRQKLLEQSIQSAQETEKSLHLIQESLTFIDKQLAAYIADKVDAAQMPQEAQKIQSDLTSHEISLEEMKKHNQGKEAAQRVLSQIDVAQKKLQDVSMKFRLFQKPANFELRLQESKMILDEVKMHLPALETKSVEQEVVQSQLNHCVNLYKSLSEVKSEVEMVIKTGRQIVQKKQTENPKELDERVTALKLHYNELGAKVTERKQQLEKCLKLSRKMRKEMNVLTEWLAATDMELTKRSAVEGMPSNLDSEVAWGKATQKEIEKQKVHLKSITEVGEALKTVLGKKETLVEDKLSLLNSNWIAVTSRAEEWLNLLLEYQKHMETFDQNVDHITKWIIQADTLLDESEKKKPQQKEDVLKRLKAELNDIRPKVDSTRDQAANLMANRGDHCRKLVEPQISELNHRFAAISHRIKTGKASIPLKELEQFNSDIQKLLEPLEAEIQQGVNLKEEDFNKDMNEDNEGTVKELLQRGDNLQQRITDERKREEIKIKQQLLQTKHNALKDLRSQRRKKALEISHQWYQYKRQADDLLKCLDDIEKKLASLPEPRDERKIKEIDRELQKKKEELNAVRRQAEGLSEDGAAMAVEPTQIQLSKRWREIESKFAQFRRLNFAQIHTVREETMMVMTEDMPLEISYVPSTYLTEITHVSQALLEVEQLLNAPDLCAKDFEDLFKQEESLKNIKDSLQQSSGRIDIIHSKKTAALQSATPVERVKLQEALSQLDFQWEKVNKMYKDRQGRFDRSVEKWRRFHYDIKIFNQWLTEAEQFLRKTQIPENWEHAKYKWYLKELQDGIGQRQTVVRTLNATGEEIIQQSSKTDASILQEKLGSLNLRWQEVCKQLSDRKKRLEEQKNILSEFQRDLNEFVLWLEEADNIASIPLEPGKEQQLKEKLEQVKLLVEELPLRQGILKQLNETGGPVLVSAPISPEEQDKLENKLKQTNLQWIKVSRALPEKQGEIEAQIKDLGQLEKKLEDLEEQLNHLLLWLSPIRNQLEIYNQPNQEGPFDVQETEIAVQAKQPDVEEILSKGQHLYKEKPATQPVKRKLEDLSSEWKAVNRLLQELRAKQPDLAPGLTTIGASPTQTVTLVTQPVVTKETAISKLEMPSSLMLEVPALADFNRAWTELTDWLSLLDQVIKSQRVMVGDLEDINEMIIKQKATMQDLEQRRPQLEELITAAQNLKNKTSNQEARTIITDRIERIQNQWDEVQEHLQNRRQQLNEMLKDSTQWLEAKEEAEQVLGQARAKLESWKEGPYTVDAIQKKITETKQLAKDLRQWQTNVDVANDLALKLLRDYSADDTRKVHMITENINASWRSIHKRVSEREAALEETHRLLQQFPLDLEKFLAWLTEAETTANVLQDATRKERLLEDSKGVKELMKQWQDLQGEIEAHTDVYHNLDENSQKILRSLEGSDDAVLLQRRLDNMNFKWSELRKKSLNIRSHLEASSDQWKRLHLSLQELLVWLQLKDDELSRQAPIGGDFPAVQKQNDVHRAFKRELKTKEPVIMSTLETVRIFLTEQPLEGLEKLYQEPRELPPEERAQNVTRLLRKQAEEVNTEWEKLNLHSADWQRKIDETLERLQELQEATDELDLKLRQAEVIKGSWQPVGDLLIDSLQDHLEKVKALRGEIAPLKENVSHVNDLARQLTTLGIQLSPYNLSTLEDLNTRWKLLQVAVEDRVRQLHEAHRDFGPASQHFLSTSVQGPWERAISPNKVPYYINHETQTTCWDHPKMTELYQSLADLNNVRFSAYRTAMKLRRLQKALCLDLLSLSAACDALDQHNLKQNDQPMDILQIINCLTTIYDRLEQEHNNLVNVPLCVDMCLNWLLNVYDTGRTGRIRVLSFKTGIISLCKAHLEDKYRYLFKQVASSTGFCDQRRLGLLLHDSIQIPRQLGEVASFGGSNIEPSVRSCFQFANNKPEIEAALFLDWMRLEPQSMVWLPVLHRVAAAETAKHQAKCNICKECPIIGFRYRSLKHFNYDICQSCFFSGRVAKGHKMHYPMVEYCTPTTSGEDVRDFAKVLKNKFRTKRYFAKHPRMGYLPVQTVLEGDNMETPVTLINFWPVDSAPASSPQLSHDDTHSRIEHYASRLAEMENSNGSYLNDSISPNESIDDEHLLIQHYCQSLNQDSPLSQPRSPAQILISLESEERGELERILADLEEENRNLQAEYDRLKQQHEHKGLSPLPSPPEMMPTSPQSPRDAELIAEAKLLRQHKGRLEARMQILEDHNKQLESQLHRLRQLLEQPQAEAKVNGTTVSSPSTSLQRSDSSQPMLLRVVGSQTSDSMGEEDLLSPPQDTSTGLEEVMEQLNNSFPSSRGRNTPGKPMREDTM

SEQ ID NO: 17 - DNA, 11142 bp, Artificial Sequence
  Transportan-dystrophin fusion protein nucleotide sequence
  misc_feature (1)..(11142)
atgggttggactttaaattctgctggttatttattaggtaaaattaatttaaaagctttagctgccttggccaagaagatcttgatgctttggtgggaagaagtagaggactgttatgaaagagaagatgttcaaaagaaaacattcacaaaatgggtaaatgcacaattttctaagtttgggaagcagcatattgagaacctcttcagtgacctacaggatgggaggcgcctcctagacctcctcgaaggcctgacagggcaaaaactgccaaaagaaaaaggatccacaagagttcatgccctgaacaatgtcaacaaggcactgcgggttttgcagaacaataatgttgatttagtgaatattggaagtactgacatcgtagatggaaatcataaactgactcttggtttgatttggaatataatcctccactggcaggtcaaaaatgtaatgaaaaatatcatggctggattgcaacaaaccaacagtgaaaagattctcctgagctgggtccgacaatcaactcgtaattatccacaggttaatgtaatcaacttcaccaccagctggtctgatggcctggctttgaatgctctcatccatagtcataggccagacctatttgactggaatagtgtggtttgccagcagtcagccacacaacgactggaacatgcattcaacatcgccagatatcaattaggcatagagaaactactcgatcctgaagatgttgataccacctatccagataagaagtccatcttaatgtacatcacatcactcttccaagttttgcctcaacaagtgagcattgaagccatccaggaagtggaaatgttgccaaggccacctaaagtgactaaagaagaacattttcagttacatcatcaaatgcactattctcaacagatcacggtcagtctagcacagggatatgagagaacttcttcccctaagcctcgattcaagagctatgcctacacacaggctgcttatgtcaccacctctgaccctacacggagcccatttccttcacagcatttggaagctcctgaagacaagtcatttggcagttcattgatggagagtgaagtaaacctggaccgttatcaaacagctttagaagaagtattatcgtggcttctttctgctgaggacacattgcaagcacaaggagagatttctaatgatgtggaagtggtgaaagaccagtttcatactcatgaggggtacatgatggatttgacagcccatcagggccgggttggtaatattctacaattgggaagtaagctgattggaacaggaaaattatcagaagatgaagaaactgaagtacaagagcagatgaatctcctaaattcaagatgggaatgcctcagggtagctagcatggaaaaacaaagcaatttacatagagttttaatggatctccagaatcagaaactgaaagagttgaatgactggctaacaaaaacagaagaaagaacaaggaaaatggaggaagagcctcttggacctgatcttgaagacctaaaacgccaagtacaacaacataaggtgcttcaagaagatctagaacaagaacaagtcagggtcaattctctcactcacatggtggtggtagttgatgaatctagtggagatcacgcaactgctgctttggaagaacaacttaaggtattgggagatcgatgggcaaacatctgtagatggacagaagaccgctgggttcttttacaagacatccttctcaaatggcaacgtcttactgaagaacagtgcctttttagtgcatggctttcagaaaaagaagatgcagtgaacaagattcacacaactggctttaaagatcaaaatgaaatgttatcaagtcttcaaaaactggccgttttaaaagcggatctagaaaagaaaaagcaatccatgggcaaactgtattcactcaaacaagatcttctttcaacactgaagaataagtcagtgacccagaagacggaagcatggctggataactttgcccggtgttgggataatttagtccaaaaacttgaaaagagtacagcacagatttcacaggctgtcaccaccactcagccatcactaacacagacaactgtaatggaaacagtaactacggtgaccacaagggaacagatcctggtaaagcatgctcaagaggaacttccaccaccacctccccaaaagaagaggcagattactgtggattctgaaattaggaaaaggttggatgttgatataactgaacttcacagctggattactcgctcagaagctgtgttgcagagtcctgaatttgcaatctttcggaaggaaggcaacttctcagacttaaaagaaaaagtcaatgccatagagcgagaaaaagctgagaagttcagaaaactgcaagatgccagcagatcagctcaggccctggtggaacagatggtgaatgagggtgttaatgcagatagcatcaaacaagcctcagaacaactgaacagccggtggatcgaattctgccagttgctaagtgagagacttaactggctggagtatcagaacaacatcatcgctttctataatcagctacaacaattggagcagatgacaactactgctgaaaactggttgaaaatccaacccaccaccccatcagagccaacagcaattaaaagtcagttaaaaatttgtaaggatgaagtcaaccggctatcaggtcttcaacctcaaattgaacgattaaaaattcaaagcatagccctgaaagagaaaggacaaggacccatgttcctggatgcagactttgtggcctttacaaatcattttaagcaagtcttttctgatgtgcaggccagagagaaagagctacagacaatttttgacactttgccaccaatgcgctatcaggagaccatgagtgccatcaggacatgggtccagcagtcagaaaccaaactctccatacctcaacttagtgtcaccgactatgaaatcatggagcagagactcggggaattgcaggctttacaaagttctctgcaagagcaacaaagtggcctatactatctcagcaccactgtgaaagagatgtcgaagaaagcgccctctgaaattagccggaaatatcaatcagaatttgaagaaattgagggacgctggaagaagctctcctcccagctggttgagcattgtcaaaagctagaggagcaaatgaataaactccgaaaaattcagaatcacatacaaaccctgaagaaatggatggctgaagttgatgtttttctgaaggaggaatggcctgcccttggggattcagaaattctaaaaaagcagctgaaacagtgcagacttttagtcagtgatattcagacaattcagcccagtctaaacagtgtcaatgaaggtgggcagaagataaagaatgaagcagagccagagtttgcttcgagacttgagacagaactcaaagaacttaacactcagtgggatcacatgtgccaacaggtctatgccagaaaggaggccttgaagggaggtttggagaaaactgtaagcctccagaaagatctatcagagatgcacgaatggatgacacaagctgaagaagagtatcttgagagagattttgaatataaaactccagatgaattacagaaagcagttgaagagatgaagagagctaaagaagaggcccaacaaaaagaagcgaaagtgaaactccttactgagtctgtaaatagtgtcatagctcaagctccacctgtagcacaagaggccttaaaaaaggaacttgaaactctaaccaccaactaccagtggctctgcactaggctgaatgggaaatgcaagactttggaagaagtttgggcatgttggcatgagttattgtcatacttggagaaagcaaacaagtggctaaatgaagtagaatttaaacttaaaaccactgaaaacattcctggcggagctgaggaaatctctgaggtgctagattcacttgaaaatttgatgcgacattcagaggataacccaaatcagattcgcatattggcacagaccctaacagatggcggagtcatggatgagctaatcaatgaggaacttgagacatttaattctcgttggagggaactacatgaagaggctgtaaggaggcaaaagttgcttgaacagagcatccagtctgcccaggagactgaaaaatccttacacttaatccaggagtccctcacattcattgacaagcagttggcagcttatattgcagacaaggtggacgcagctcaaatgcctcaggaagcccagaaaatccaatctgatttgacaagtcatgagatcagtttagaagaaatgaagaaacataatcaggggaaggaggctgcccaaagagtcctgtctcagattgatgttgcacagaaaaaattacaagatgtctccatgaagtttcgattattccagaaaccagccaattttgagctgcgtctacaagaaagtaagatgattttagatgaagtgaagatgcacttgcctgcattggaaacaaagagtgtggaacaggaagtagtacagtcacagctaaatcattgtgtgaacttgtataaaagtctgagtgaagtgaagtctgaagtggaaatggtgataaagactggacgtcagattgtacagaaaaagcagacggaaaatcccaaagaacttgatgaaagagtaacagctttgaaattgcattataatgagctgggagcaaaggtaacagaaagaaagcaacagttggagaaatgcttgaaattgtcccgtaagatgcgaaaggaaatgaatgtcttgacagaatggctggcagctacagatatggaattgacaaagagatcagcagttgaaggaatgcctagtaatttggattctgaagttgcctggggaaaggctactcaaaaagagattgagaaacagaaggtgcacctgaagagtatcacagaggtaggagaggccttgaaaacagttttgggcaagaaggagacgttggtggaagataaactcagtcttctgaatagtaactggatagctgtcacctcccgagcagaagagtggttaaatcttttgttggaataccagaaacacatggaaacttttgaccagaatgtggaccacatcacaaagtggatcattcaggctgacacacttttggatgaatcagagaaaaagaaaccccagcaaaaagaagacgtgcttaagcgtttaaaggcagaactgaatgacatacgcccaaaggtggactctacacgtgaccaagcagcaaacttgatggcaaaccgcggtgaccactgcaggaaattagtagagccccaaatctcagagctcaaccatcgatttgcagccatttcacacagaattaagactggaaaggcctccattcctttgaaggaattggagcagtttaactcagatatacaaaaattgcttgaaccactggaggctgaaattcagcagggggtgaatctgaaagaggaagacttcaataaagatatgaatgaagacaatgagggtactgtaaaagaattgttgcaaagaggagacaacttacaacaaagaatcacagatgagagaaagagagaggaaataaagataaaacagcagctgttacagacaaaacataatgctctcaaggatttgaggtctcaaagaagaaaaaaggctctagaaatttctcatcagtggtatcagtacaagaggcaggctgatgatctcctgaaatgcttggatgacattgaaaaaaaattagccagcctacctgagcccagagatgaaaggaaaataaaggaaattgatcgggaattgcagaagaagaaagaggagctgaatgcagtgcgtaggcaagctgagggcttgtctgaggatggggccgcaatggcagtggagccaactcagatccagctcagcaagcgctggcgggaaattgagagcaaatttgctcagtttcgaagactcaactttgcacaaattcacactgtccgtgaagaaacgatgatggtgatgactgaagacatgcctttggaaatttcttatgtgccttctacttatttgactgaaatcactcatgtctcacaagccctattagaagtggaacaacttctcaatgctcctgacctctgtgctaaggactttgaagatctctttaagcaagaggagtctctgaagaatataaaagatagtctacaacaaagctcaggtcggattgacattattcatagcaagaagacagcagcattgcaaagtgcaacgcctgtggaaagggtgaagctacaggaagctctctcccagcttgatttccaatgggaaaaagttaacaaaatgtacaaggaccgacaagggcgatttgacagatctgttgagaaatggcggcgttttcattatgatataaagatatttaatcagtggctaacagaagctgaacagtttctcagaaagacacaaattcctgagaattgggaacatgctaaatacaaatggtatcttaaggaactccaggatggcattgggcagcggcaaactgttgtcagaacattgaatgcaactggggaagaaataattcagcaatcctcaaaaacagatgccagtattctacaggaaaaattgggaagcctgaatctgcggtggcaggaggtctgcaaacagctgtcagacagaaaaaagaggctagaagaacaaaagaatatcttgtcagaatttcaaagagatttaaatgaatttgttttatggttggaggaagcagataacattgctagtatcccacttgaacctggaaaagagcagcaactaaaagaaaagcttgagcaagtcaagttactggtggaagagttgcccctgcgccagggaattctcaaacaattaaatgaaactggaggacccgtgcttgtaagtgctcccataagcccagaagagcaagataaacttgaaaataagctcaagcagacaaatctccagtggataaaggtttccagagctttacctgagaaacaaggagaaattgaagctcaaataaaagaccttgggcagcttgaaaaaaagcttgaagaccttgaagagcagttaaatcatctgctgctgtggttatctcctattaggaatcagttggaaatttataaccaaccaaaccaagaaggaccatttgacgttcaggaaactgaaatagcagttcaagctaaacaaccggatgtggaagagattttgtctaaagggcagcatttgtacaaggaaaaaccagccactcagccagtgaagaggaagttagaagatctgagctctgagtggaaggcggtaaaccgtttacttcaagagctgagggcaaagcagcctgacctagctcctggactgaccactattggagcctctcctactcagactgttactctggtgacacaacctgtggttactaaggaaactgccatctccaaactagaaatgccatcttccttgatgttggaggtacctgctctggcagatttcaaccgggcttggacagaacttaccgactggctttctctgcttgatcaagttataaaatcacagagggtgatggtgggtgaccttgaggatatcaacgagatgatcatcaagcagaaggcaacaatgcaggatttggaacagaggcgtccccagttggaagaactcattaccgctgcccaaaatttgaaaaacaagaccagcaatcaagaggctagaacaatcattacggatcgaattgaaagaattcagaatcagtgggatgaagtacaagaacaccttcagaaccggaggcaacagttgaatgaaatgttaaaggattcaacacaatggctggaagctaaggaagaagctgagcaggtcttaggacaggccagagccaagcttgagtcatggaaggagggtccctatacagtagatgcaatccaaaagaaaatcacagaaaccaagcagttggccaaagacctccgccagtggcagacaaatgtagatgtggcaaatgacttggccctgaaacttctccgggattattctgcagatgataccagaaaagtccacatgataacagagaatatcaatgcctcttggagaagcattcataaaagggtgagtgagcgagaggctgctttggaagaaactcatagattactgcaacagttccccctggacctggaaaagtttcttgcctggcttacagaagctgaaacaactgccaatgtcctacaggatgctacccgtaaggaaaggctcctagaagactccaagggagtaaaagagctgatgaaacaatggcaagacctccaaggtgaaattgaagctcacacagatgtttatcacaacctggatgaaaacagccaaaaaatcctgagatccctggaaggttccgatgatgcagtcctgttacaaagacgtttggataacatgaacttcaagtggagtgaacttcggaaaaagtctctcaacattaggtcccatttggaagccagttctgaccagtggaagcgtctgcacctttctctgcaggaacttctggtgtggctacagctgaaagatgatgaattaagccggcaggcacctattggaggcgactttccagcagttcagaagcagaacgatgtacatagggccttcaagagggaattgaaaactaaagaacctgtaatcatgagtactcttgagactgtacgaatatttctgacagagcagcctttggaaggactagagaaactctaccaggagcccagagagctgcctcctgaggagagagcccagaatgtcactcggcttctacgaaagcaggctgaggaggtcaatactgagtgggaaaaattgaacctgcactccgctgactggcagagaaaaatagatgagacccttgaaagactccaggaacttcaagaggccacggatgagctggacctcaagctgcgccaagctgaggtgatcaagggatcctggcagcccgtgggcgatctcctcattgactctctccaagatcacctcgagaaagtcaaggcacttcgaggagaaattgcgcctctgaaagagaacgtgagccacgtcaatgaccttgctcgccagcttaccactttgggcattcagctctcaccgtataacctcagcactctggaagacctgaacaccagatggaagcttctgcaggtggccgtcgaggaccgagtcaggcagctgcatgaagcccacagggactttggtccagcatctcagcactttctttccacgtctgtccagggtccctgggagagagccatctcgccaaacaaagtgccctactatatcaaccacgagactcaaacaacttgctgggaccatcccaaaatgacagagctctaccagtctttagctgacctgaataatgtcagattctcagcttataggactgccatgaaactccgaagactgcagaaggccctttgcttggatctcttgagcctgtcagctgcatgtgatgccttggaccagcacaacctcaagcaaaatgaccagcccatggatatcctgcagattattaattgtttgaccactatttatgaccgcctggagcaagagcacaacaatttggtcaacgtccctctctgcgtggatatgtgtctgaactggctgctgaatgtttatgatacgggacgaacagggaggatccgtgtcctgtcttttaaaactggcatcatttccctgtgtaaagcacatttggaagacaagtacagataccttttcaagcaagtggcaagttcaacaggattttgtgaccagcgcaggctgggcctccttctgcatgattctatccaaattccaagacagttgggtgaagttgcatcctttgggggcagtaacattgagccaagtgtccggagctgcttccaatttgctaataataagccagagatcgaagcggccctcttcctagactggatgagactggaaccccagtccatggtgtggctgcccgtcctgcacagagtggctgctgcagaaactgccaagcatcaggccaaatgtaacatctgcaaagagtgtccaatcattggattcaggtacaggagtctaaagcactttaattatgacatctgccaaagctgctttttttctggtcgagttgcaaaaggccataaaatgcactatcccatggtggaatattgcactccgactacatcaggagaagatgttcgagactttgccaaggtactaaaaaacaaatttcgaaccaaaaggtattttgcgaagcatccccgaatgggctacctgccagtgcagactgtcttagagggggacaacatggaaactcccgttactctgatcaacttctggccagtagattctgcgcctgcctcgtcccctcagctttcacacgatgatactcattcacgcattgaacattatgctagcaggctagcagaaatggaaaacagcaatggatcttatctaaatgatagcatctctcctaatgagagcatagatgatgaacatttgttaatccagcattactgccaaagtttgaaccaggactcccccctgagccagcctcgtagtcctgcccagatcttgatttccttagagagtgaggaaagaggggagctagagagaatcctagcagatcttgaggaagaaaacaggaatctgcaagcagaatatgaccgtctaaagcagcagcacgaacataaaggcctgtccccactgccgtcccctcctgaaatgatgcccacctctccccagagtccccgggatgctgagctcattgctgaggccaagctactgcgtcaacacaaaggccgcctggaagccaggatgcaaatcctggaagaccacaataaacagctggagtcacagttacacaggctaaggcagctgctggagcaaccccaggcagaggccaaagtgaatggcacaacggtgtcctctccttctacctctctacagaggtccgacagcagtcagcctatgctgctccgagtggttggcagtcaaacttcggactccatgggtgaggaagatcttctcagtcctccccaggacacaagcacagggttagaggaggtgatggagcaactcaacaactccttccctagttcaagaggaagaaatacccctggaaagccaatgagagaggacacaatgtag

SEQ ID NO: 18 - protein, 3713 aa, Artificial Sequence
  Transportan-dystrophin fusion protein amino acid sequence
  MISC_FEATURE (1)..(3713)
MGWTLNSAGYLLGKINLKALAALAKKILMLWWEEVEDCYEREDVQKKTFTKWVNAQFSKFGKQHIENLFSDLQDGRRLLDLLEGLTGQKLPKEKGSTRVHALNNVNKALRVLQNNNVDLVNIGSTDIVDGNHKLTLGLIWNIILHWQVKNVMKNIMAGLQQTNSEKILLSWVRQSTRNYPQVNVINFTTSWSDGLALNALIHSHRPDLFDWNSVVCQQSATQRLEHAFNIARYQLGIEKLLDPEDVDTTYPDKKSILMYITSLFQVLPQQVSIEAIQEVEMLPRPPKVTKEEHFQLHHQMHYSQQITVSLAQGYERTSSPKPRFKSYAYTQAAYVTTSDPTRSPFPSQHLEAPEDKSFGSSLMESEVNLDRYQTALEEVLSWLLSAEDTLQAQGEISNDVEVVKDQFHTHEGYMMDLTAHQGRVGNILQLGSKLIGTGKLSEDEETEVQEQMNLLNSRWECLRVASMEKQSNLHRVLMDLQNQKLKELNDWLTKTEERTRKMEEEPLGPDLEDLKRQVQQHKVLQEDLEQEQVRVNSLTHMVVVVDESSGDHATAALEEQLKVLGDRWANICRWTEDRWVLLQDILLKWQRLTEEQCLFSAWLSEKEDAVNKIHTTGFKDQNEMLSSLQKLAVLKADLEKKKQSMGKLYSLKQDLLSTLKNKSVTQKTEAWLDNFARCWDNLVQKLEKSTAQISQAVTTTQPSLTQTTVMETVTTVTTREQILVKHAQEELPPPPPQKKRQITVDSEIRKRLDVDITELHSWITRSEAVLQSPEFAIFRKEGNFSDLKEKVNAIEREKAEKFRKLQDASRSAQALVEQMVNEGVNADSIKQASEQLNSRWIEFCQLLSERLNWLEYQNNIIAFYNQLQQLEQMTTTAENWLKIQPTTPSEPTAIKSQLKICKDEVNRLSGLQPQIERLKIQSIALKEKGQGPMFLDADFVAFTNHFKQVFSDVQAREKELQTIFDTLPPMRYQETMSAIRTWVQQSETKLSIPQLSVTDYEIMEQRLGELQALQSSLQEQQSGLYYLSTTVKEMSKKAPSEISRKYQSEFEEIEGRWKKLSSQLVEHCQKLEEQMNKLRKIQNHIQTLKKWMAEVDVFLKEEWPALGDSEILKKQLKQCRLLVSDIQTIQPSLNSVNEGGQKIKNEAEPEFASRLETELKELNTQWDHMCQQVYARKEALKGGLEKTVSLQKDLSEMHEWMTQAEEEYLERDFEYKTPDELQKAVEEMKRAKEEAQQKEAKVKLLTESVNSVIAQAPPVAQEALKKELETLTTNYQWLCTRLNGKCKTLEEVWACWHELLSYLEKANKWLNEVEFKLKTTENIPGGAEEISEVLDSLENLMRHSEDNPNQIRILAQTLTDGGVMDELINEELETFNSRWRELHEEAVRRQKLLEQSIQSAQETEKSLHLIQESLTFIDKQLAAYIADKVDAAQMPQEAQKIQSDLTSHEISLEEMKKHNQGKEAAQRVLSQIDVAQKKLQDVSMKFRLFQKPANFELRLQESKMILDEVKMHLPALETKSVEQEVVQSQLNHCVNLYKSLSEVKSEVEMVIKTGRQIVQKKQTENPKELDERVTALKLHYNELGAKVTERKQQLEKCLKLSRKMRKEMNVLTEWLAATDMELTKRSAVEGMPSNLDSEVAWGKATQKEIEKQKVHLKSITEVGEALKTVLGKKETLVEDKLSLLNSNWIAVTSRAEEWLNLLLEYQKHMETFDQNVDHITKWIIQADTLLDESEKKKPQQKEDVLKRLKAELNDIRPKVDSTRDQAANLMANRGDHCRKLVEPQISELNHRFAAISHRIKTGKASIPLKELEQFNSDIQKLLEPLEAEIQQGVNLKEEDFNKDMNEDNEGTVKELLQRGDNLQQRITDERKREEIKIKQQLLQTKHNALKDLRSQRRKKALEISHQWYQYKRQADDLLKCLDDIEKKLASLPEPRDERKIKEIDRELQKKKEELNAVRRQAEGLSEDGAAMAVEPTQIQLSKRWREIESKFAQFRRLNFAQIHTVREETMMVMTEDMPLEISYVPSTYLTEITHVSQALLEVEQLLNAPDLCAKDFEDLFKQEESLKNIKDSLQQSSGRIDIIHSKKTAALQSATPVERVKLQEALSQLDFQWEKVNKMYKDRQGRFDRSVEKWRRFHYDIKIFNQWLTEAEQFLRKTQIPENWEHAKYKWYLKELQDGIGQRQTVVRTLNATGEEIIQQSSKTDASILQEKLGSLNLRWQEVCKQLSDRKKRLEEQKNILSEFQRDLNEFVLWLEEADNIASIPLEPGKEQQLKEKLEQVKLLVEELPLRQGILKQLNETGGPVLVSAPISPEEQDKLENKLKQTNLQWIKVSRALPEKQGEIEAQIKDLGQLEKKLEDLEEQLNHLLLWLSPIRNQLEIYNQPNQEGPFDVQETEIAVQAKQPDVEEILSKGQHLYKEKPATQPVKRKLEDLSSEWKAVNRLLQELRAKQPDLAPGLTTIGASPTQTVTLVTQPVVTKETAISKLEMPSSLMLEVPALADFNRAWTELTDWLSLLDQVIKSQRVMVGDLEDINEMIIKQKATMQDLEQRRPQLEELITAAQNLKNKTSNQEARTIITDRIERIQNQWDEVQEHLQNRRQQLNEMLKDSTQWLEAKEEAEQVLGQARAKLESWKEGPYTVDAIQKKITETKQLAKDLRQWQTNVDVANDLALKLLRDYSADDTRKVHMITENINASWRSIHKRVSEREAALEETHRLLQQFPLDLEKFLAWLTEAETTANVLQDATRKERLLEDSKGVKELMKQWQDLQGEIEAHTDVYHNLDENSQKILRSLEGSDDAVLLQRRLDNMNFKWSELRKKSLNIRSHLEASSDQWKRLHLSLQELLVWLQLKDDELSRQAPIGGDFPAVQKQNDVHRAFKRELKTKEPVIMSTLETVRIFLTEQPLEGLEKLYQEPRELPPEERAQNVTRLLRKQAEEVNTEWEKLNLHSADWQRKIDETLERLQELQEATDELDLKLRQAEVIKGSWQPVGDLLIDSLQDHLEKVKALRGEIAPLKENVSHVNDLARQLTTLGIQLSPYNLSTLEDLNTRWKLLQVAVEDRVRQLHEAHRDFGPASQHFLSTSVQGPWERAISPNKVPYYINHETQTTCWDHPKMTELYQSLADLNNVRFSAYRTAMKLRRLQKALCLDLLSLSAACDALDQHNLKQNDQPMDILQIINCLTTIYDRLEQEHNNLVNVPLCVDMCLNWLLNVYDTGRTGRIRVLSFKTGIISLCKAHLEDKYRYLFKQVASSTGFCDQRRLGLLLHDSIQIPRQLGEVASFGGSNIEPSVRSCFQFANNKPEIEAALFLDWMRLEPQSMVWLPVLHRVAAAETAKHQAKCNICKECPIIGFRYRSLKHFNYDICQSCFFSGRVAKGHKMHYPMVEYCTPTTSGEDVRDFAKVLKNKFRTKRYFAKHPRMGYLPVQTVLEGDNMETPVTLINFWPVDSAPASSPQLSHDDTHSRIEHYASRLAEMENSNGSYLNDSISPNESIDDEHLLIQHYCQSLNQDSPLSQPRSPAQILISLESEERGELERILADLEEENRNLQAEYDRLKQQHEHKGLSPLPSPPEMMPTSPQSPRDAELIAEAKLLRQHKGRLEARMQILEDHNKQLESQLHRLRQLLEQPQAEAKVNGTTVSSPSTSLQRSDSSQPMLLRVVGSQTSDSMGEEDLLSPPQDTSTGLEEVMEQLNNSFPSSRGRNTPGKPMREDTM

SEQ ID NO: 19 - DNA, 11097 bp, Artificial Sequence
  TfRbp-dystrophin fusion protein nucleotide sequence
  misc_feature (1)..(11097)
atgactcatcgtcctcctatgtggtctcctgtttggcctatgctttggtgggaagaagtagaggactgttatgaaagagaagatgttcaaaagaaaacattcacaaaatgggtaaatgcacaattttctaagtttgggaagcagcatattgagaacctcttcagtgacctacaggatgggaggcgcctcctagacctcctcgaaggcctgacagggcaaaaactgccaaaagaaaaaggatccacaagagttcatgccctgaacaatgtcaacaaggcactgcgggttttgcagaacaataatgttgatttagtgaatattggaagtactgacatcgtagatggaaatcataaactgactcttggtttgatttggaatataatcctccactggcaggtcaaaaatgtaatgaaaaatatcatggctggattgcaacaaaccaacagtgaaaagattctcctgagctgggtccgacaatcaactcgtaattatccacaggttaatgtaatcaacttcaccaccagctggtctgatggcctggctttgaatgctctcatccatagtcataggccagacctatttgactggaatagtgtggtttgccagcagtcagccacacaacgactggaacatgcattcaacatcgccagatatcaattaggcatagagaaactactcgatcctgaagatgttgataccacctatccagataagaagtccatcttaatgtacatcacatcactcttccaagttttgcctcaacaagtgagcattgaagccatccaggaagtggaaatgttgccaaggccacctaaagtgactaaagaagaacattttcagttacatcatcaaatgcactattctcaacagatcacggtcagtctagcacagggatatgagagaacttcttcccctaagcctcgattcaagagctatgcctacacacaggctgcttatgtcaccacctctgaccctacacggagcccatttccttcacagcatttggaagctcctgaagacaagtcatttggcagttcattgatggagagtgaagtaaacctggaccgttatcaaacagctttagaagaagtattatcgtggcttctttctgctgaggacacattgcaagcacaaggagagatttctaatgatgtggaagtggtgaaagaccagtttcatactcatgaggggtacatgatggatttgacagcccatcagggccgggttggtaatattctacaattgggaagtaagctgattggaacaggaaaattatcagaagatgaagaaactgaagtacaagagcagatgaatctcctaaattcaagatgggaatgcctcagggtagctagcatggaaaaacaaagcaatttacatagagttttaatggatctccagaatcagaaactgaaagagttgaatgactggctaacaaaaacagaagaaagaacaaggaaaatggaggaagagcctcttggacctgatcttgaagacctaaaacgccaagtacaacaacataaggtgcttcaagaagatctagaacaagaacaagtcagggtcaattctctcactcacatggtggtggtagttgatgaatctagtggagatcacgcaactgctgctttggaagaacaacttaaggtattgggagatcgatgggcaaacatctgtagatggacagaagaccgctgggttcttttacaagacatccttctcaaatggcaacgtcttactgaagaacagtgcctttttagtgcatggctttcagaaaaagaagatgcagtgaacaagattcacacaactggctttaaagatcaaaatgaaatgttatcaagtcttcaaaaactggccgttttaaaagcggatctagaaaagaaaaagcaatccatgggcaaactgtattcactcaaacaagatcttctttcaacactgaagaataagtcagtgacccagaagacggaagcatggctggataactttgcccggtgttgggataatttagtccaaaaacttgaaaagagtacagcacagatttcacaggctgtcaccaccactcagccatcactaacacagacaactgtaatggaaacagtaactacggtgaccacaagggaacagatcctggtaaagcatgctcaagaggaacttccaccaccacctccccaaaagaagaggcagattactgtggattctgaaattaggaaaaggttggatgttgatataactgaacttcacagctggattactcgctcagaagctgtgttgcagagtcctgaatttgcaatctttcggaaggaaggcaacttctcagacttaaaagaaaaagtcaatgccatagagcgagaaaaagctgagaagttcagaaaactgcaagatgccagcagatcagctcaggccctggtggaacagatggtgaatgagggtgttaatgcagatagcatcaaacaagcctcagaacaactgaacagccggtggatcgaattctgccagttgctaagtgagagacttaactggctggagtatcagaacaacatcatcgctttctataatcagctacaacaattggagcagatgacaactactgctgaaaactggttgaaaatccaacccaccaccccatcagagccaacagcaattaaaagtcagttaaaaatttgtaaggatgaagtcaaccggctatcaggtcttcaacctcaaattgaacgattaaaaattcaaagcatagccctgaaagagaaaggacaaggacccatgttcctggatgcagactttgtggcctttacaaatcattttaagcaagtcttttctgatgtgcaggccagagagaaagagctacagacaatttttgacactttgccaccaatgcgctatcaggagaccatgagtgccatcaggacatgggtccagcagtcagaaaccaaactctccatacctcaacttagtgtcaccgactatgaaatcatggagcagagactcggggaattgcaggctttacaaagttctctgcaagagcaacaaagtggcctatactatctcagcaccactgtgaaagagatgtcgaagaaagcgccctctgaaattagccggaaatatcaatcagaatttgaagaaattgagggacgctggaagaagctctcctcccagctggttgagcattgtcaaaagctagaggagcaaatgaataaactccgaaaaattcagaatcacatacaaaccctgaagaaatggatggctgaagttgatgtttttctgaaggaggaatggcctgcccttggggattcagaaattctaaaaaagcagctgaaacagtgcagacttttagtcagtgatattcagacaattcagcccagtctaaacagtgtcaatgaaggtgggcagaagataaagaatgaagcagagccagagtttgcttcgagacttgagacagaactcaaagaacttaacactcagtgggatcacatgtgccaacaggtctatgccagaaaggaggccttgaagggaggtttggagaaaactgtaagcctccagaaagatctatcagagatgcacgaatggatgacacaagctgaagaagagtatcttgagagagattttgaatataaaactccagatgaattacagaaagcagttgaagagatgaagagagctaaagaagaggcccaacaaaaagaagcgaaagtgaaactccttactgagtctgtaaatagtgtcatagctcaagctccacctgtagcacaagaggccttaaaaaaggaacttgaaactctaaccaccaactaccagtggctctgcactaggctgaatgggaaatgcaagactttggaagaagtttgggcatgttggcatgagttattgtcatacttggagaaagcaaacaagtggctaaatgaagtagaatttaaacttaaaaccactgaaaacattcctggcggagctgaggaaatctctgaggtgctagattcacttgaaaatttgatgcgacattcagaggataacccaaatcagattcgcatattggcacagaccctaacagatggcggagtcatggatgagctaatcaatgaggaacttgagacatttaattctcgttggagggaactacatgaagaggctgtaaggaggcaaaagttgcttgaacagagcatccagtctgcccaggagactgaaaaatccttacacttaatccaggagtccctcacattcattgacaagcagttggcagcttatattgcagacaaggtggacgcagctcaaatgcctcaggaagcccagaaaatccaatctgatttgacaagtcatgagatcagtttagaagaaatgaagaaacataatcaggggaaggaggctgcccaaagagtcctgtctcagattgatgttgcacagaaaaaattacaagatgtctccatgaagtttcgattattccagaaaccagccaattttgagctgcgtctacaagaaagtaagatgattttagatgaagtgaagatgcacttgcctgcattggaaacaaagagtgtggaacaggaagtagtacagtcacagctaaatcattgtgtgaacttgtataaaagtctgagtgaagtgaagtctgaagtggaaatggtgataaagactggacgtcagattgtacagaaaaagcagacggaaaatcccaaagaacttgatgaaagagtaacagctttgaaattgcattataatgagctgggagcaaaggtaacagaaagaaagcaacagttggagaaatgcttgaaattgtcccgtaagatgcgaaaggaaatgaatgtcttgacagaatggctggcagctacagatatggaattgacaaagagatcagcagttgaaggaatgcctagtaatttggattctgaagttgcctggggaaaggctactcaaaaagagattgagaaacagaaggtgcacctgaagagtatcacagaggtaggagaggccttgaaaacagttttgggcaagaaggagacgttggtggaagataaactcagtcttctgaatagtaactggatagctgtcacctcccgagcagaagagtggttaaatcttttgttggaataccagaaacacatggaaacttttgaccagaatgtggaccacatcacaaagtggatcattcaggctgacacacttttggatgaatcagagaaaaagaaaccccagcaaaaagaagacgtgcttaagcgtttaaaggcagaactgaatgacatacgcccaaaggtggactctacacgtgaccaagcagcaaacttgatggcaaaccgcggtgaccactgcaggaaattagtagagccccaaatctcagagctcaaccatcgatttgcagccatttcacacagaattaagactggaaaggcctccattcctttgaaggaattggagcagtttaactcagatatacaaaaattgcttgaaccactggaggctgaaattcagcagggggtgaatctgaaagaggaagacttcaataaagatatgaatgaagacaatgagggtactgtaaaagaattgttgcaaagaggagacaacttacaacaaagaatcacagatgagagaaagagagaggaaataaagataaaacagcagctgttacagacaaaacataatgctctcaaggatttgaggtctcaaagaagaaaaaaggctctagaaatttctcatcagtggtatcagtacaagaggcaggctgatgatctcctgaaatgcttggatgacattgaaaaaaaattagccagcctacctgagcccagagatgaaaggaaaataaaggaaattgatcgggaattgcagaagaagaaagaggagctgaatgcagtgcgtaggcaagctgagggcttgtctgaggatggggccgcaatggcagtggagccaactcagatccagctcagcaagcgctggcgggaaattgagagcaaatttgctcagtttcgaagactcaactttgcacaaattcacactgtccgtgaagaaacgatgatggtgatgactgaagacatgcctttggaaatttcttatgtgccttctacttatttgactgaaatcactcatgtctcacaagccctattagaagtggaacaacttctcaatgctcctgacctctgtgctaaggactttgaagatctctttaagcaagaggagtctctgaagaatataaaagatagtctacaacaaagctcaggtcggattgacattattcatagcaagaagacagcagcattgcaaagtgcaacgcctgtggaaagggtgaagctacaggaagctctctcccagcttgatttccaatgggaaaaagttaacaaaatgtacaaggaccgacaagggcgatttgacagatctgttgagaaatggcggcgttttcattatgatataaagatatttaatcagtggctaacagaagctgaacagtttctcagaaagacacaaattcctgagaattgggaacatgctaaatacaaatggtatcttaaggaactccaggatggcattgggcagcggcaaactgttgtcagaacattgaatgcaactggggaagaaataattcagcaatcctcaaaaacagatgccagtattctacaggaaaaattgggaagcctgaatctgcggtggcaggaggtctgcaaacagctgtcagacagaaaaaagaggctagaagaacaaaagaatatcttgtcagaatttcaaagagatttaaatgaatttgttttatggttggaggaagcagataacattgctagtatcccacttgaacctggaaaagagcagcaactaaaagaaaagcttgagcaagtcaagttactggtggaagagttgcccctgcgccagggaattctcaaacaattaaatgaaactggaggacccgtgcttgtaagtgctcccataagcccagaagagcaagataaacttgaaaataagctcaagcagacaaatctccagtggataaaggtttccagagctttacctgagaaacaaggagaaattgaagctcaaataaaagaccttgggcagcttgaaaaaaagcttgaagaccttgaagagcagttaaatcatctgctgctgtggttatctcctattaggaatcagttggaaatttataaccaaccaaaccaagaaggaccatttgacgttcaggaaactgaaatagcagttcaagctaaacaaccggatgtggaagagattttgtctaaagggcagcatttgtacaaggaaaaaccagccactcagccagtgaagaggaagttagaagatctgagctctgagtggaaggcggtaaaccgtttacttcaagagctgagggcaaagcagcctgacctagctcctggactgaccactattggagcctctcctactcagactgttactctggtgacacaacctgtggttactaaggaaactgccatctccaaactagaaatgccatcttccttgatgttggaggtacctgctctggcagatttcaaccgggcttggacagaacttaccgactggctttctctgcttgatcaagttataaaatcacagagggtgatggtgggtgaccttgaggatatcaacgagatgatcatcaagcagaaggcaacaatgcaggatttggaacagaggcgtccccagttggaagaactcattaccgctgcccaaaatttgaaaaacaagaccagcaatcaagaggctagaacaatcattacggatcgaattgaaagaattcagaatcagtgggatgaagtacaagaacaccttcagaaccggaggcaacagttgaatgaaatgttaaaggattcaacacaatggctggaagctaaggaagaagctgagcaggtcttaggacaggccagagccaagcttgagtcatggaaggagggtccctatacagtagatgcaatccaaaagaaaatcacagaaaccaagcagttggccaaagacctccgccagtggcagacaaatgtagatgtggcaaatgacttggccctgaaacttctccgggattattctgcagatgataccagaaaagtccacatgataacagagaatatcaatgcctcttggagaagcattcataaaagggtgagtgagcgagaggctgctttggaagaaactcatagattactgcaacagttccccctggacctggaaaagtttcttgcctggcttacagaagctgaaacaactgccaatgtcctacaggatgctacccgtaaggaaaggctcctagaagactccaagggagtaaaagagctgatgaaacaatggcaagacctccaaggtgaaattgaagctcacacagatgtttatcacaacctggatgaaaacagccaaaaaatcctgagatccctggaaggttccgatgatgcagtcctgttacaaagacgtttggataacatgaacttcaagtggagtgaacttcggaaaaagtctctcaacattaggtcccatttggaagccagttctgaccagtggaagcgtctgcacctttctctgcaggaacttctggtgtggctacagctgaaagatgatgaattaagccggcaggcacctattggaggcgactttccagcagttcagaagcagaacgatgtacatagggccttcaagagggaattgaaaactaaagaacctgtaatcatgagtactcttgagactgtacgaatatttctgacagagcagcctttggaaggactagagaaactctaccaggagcccagagagctgcctcctgaggagagagcccagaatgtcactcggcttctacgaaagcaggctgaggaggtcaatactgagtgggaaaaattgaacctgcactccgctgactggcagagaaaaatagatgagacccttgaaagactccaggaacttcaagaggccacggatgagctggacctcaagctgcgccaagctgaggtgatcaagggatcctggcagcccgtgggcgatctcctcattgactctctccaagatcacctcgagaaagtcaaggcacttcgaggagaaattgcgcctctgaaagagaacgtgagccacgtcaatgaccttgctcgccagcttaccactttgggcattcagctctcaccgtataacctcagcactctggaagacctgaacaccagatggaagcttctgcaggtggccgtcgaggaccgagtcaggcagctgcatgaagcccacagggactttggtccagcatctcagcactttctttccacgtctgtccagggtccctgggagagagccatctcgccaaacaaagtgccctactatatcaaccacgagactcaaacaacttgctgggaccatcccaaaatgacagagctctaccagtctttagctgacctgaataatgtcagattctcagcttataggactgccatgaaactccgaagactgcagaaggccctttgcttggatctcttgagcctgtcagctgcatgtgatgccttggaccagcacaacctcaagcaaaatgaccagcccatggatatcctgcagattattaattgtttgaccactatttatgaccgcctggagcaagagcacaacaatttggtcaacgtccctctctgcgtggatatgtgtctgaactggctgctgaatgtttatgatacgggacgaacagggaggatccgtgtcctgtcttttaaaactggcatcatttccctgtgtaaagcacatttggaagacaagtacagataccttttcaagcaagtggcaagttcaacaggattttgtgaccagcgcaggctgggcctccttctgcatgattctatccaaattccaagacagttgggtgaagttgcatcctttgggggcagtaacattgagccaagtgtccggagctgcttccaatttgctaataataagccagagatcgaagcggccctcttcctagactggatgagactggaaccccagtccatggtgtggctgcccgtcctgcacagagtggctgctgcagaaactgccaagcatcaggccaaatgtaacatctgcaaagagtgtccaatcattggattcaggtacaggagtctaaagcactttaattatgacatctgccaaagctgctttttttctggtcgagttgcaaaaggccataaaatgcactatcccatggtggaatattgcactccgactacatcaggagaagatgttcgagactttgccaaggtactaaaaaacaaatttcgaaccaaaaggtattttgcgaagcatccccgaatgggctacctgccagtgcagactgtcttagagggggacaacatggaaactcccgttactctgatcaacttctggccagtagattctgcgcctgcctcgtcccctcagctttcacacgatgatactcattcacgcattgaacattatgctagcaggctagcagaaatggaaaacagcaatggatcttatctaaatgatagcatctctcctaatgagagcatagatgatgaacatttgttaatccagcattactgccaaagtttgaaccaggactcccccctgagccagcctcgtagtcctgcccagatcttgatttccttagagagtgaggaaagaggggagctagagagaatcctagcagatcttgaggaagaaaacaggaatctgcaagcagaatatgaccgtctaaagcagcagcacgaacataaaggcctgtccccactgccgtcccctcctgaaatgatgcccacctctccccagagtccccgggatgctgagctcattgctgaggccaagctactgcgtcaacacaaaggccgcctggaagccaggatgcaaatcctggaagaccacaataaacagctggagtcacagttacacaggctaaggcagctgctggagcaaccccaggcagaggccaaagtgaatggcacaacggtgtcctctccttctacctctctacagaggtccgacagcagtcagcctatgctgctccgagtggttggcagtcaaacttcggactccatgggtgaggaagatcttctcagtcctccccaggacacaagcacagggttagaggaggtgatggagcaactcaacaactccttccctagttcaagaggaagaaatacccctggaaagccaatgagagaggacacaatgtag

SEQ ID NO: 20 - protein, 3698 aa, Artificial Sequence
  TfRbp-dystrophin fusion protein amino acid sequence
  MISC_FEATURE (1)..(3698)
MTHRPPMWSPVWPMLWWEEVEDCYEREDVQKKTFTKWVNAQFSKFGKQHIENLFSDLQDGRRLLDLLEGLTGQKLPKEKGSTRVHALNNVNKALRVLQNNNVDLVNIGSTDIVDGNHKLTLGLIWNIILHWQVKNVMKNIMAGLQQTNSEKILLSWVRQSTRNYPQVNVINFTTSWSDGLALNALIHSHRPDLFDWNSVVCQQSATQRLEHAFNIARYQLGIEKLLDPEDVDTTYPDKKSILMYITSLFQVLPQQVSIEAIQEVEMLPRPPKVTKEEHFQLHHQMHYSQQITVSLAQGYERTSSPKPRFKSYAYTQAAYVTTSDPTRSPFPSQHLEAPEDKSFGSSLMESEVNLDRYQTALEEVLSWLLSAEDTLQAQGEISNDVEVVKDQFHTHEGYMMDLTAHQGRVGNILQLGSKLIGTGKLSEDEETEVQEQMNLLNSRWECLRVASMEKQSNLHRVLMDLQNQKLKELNDWLTKTEERTRKMEEEPLGPDLEDLKRQVQQHKVLQEDLEQEQVRVNSLTHMVVVVDESSGDHATAALEEQLKVLGDRWANICRWTEDRWVLLQDILLKWQRLTEEQCLFSAWLSEKEDAVNKIHTTGFKDQNEMLSSLQKLAVLKADLEKKKQSMGKLYSLKQDLLSTLKNKSVTQKTEAWLDNFARCWDNLVQKLEKSTAQISQAVTTTQPSLTQTTVMETVTTVTTREQILVKHAQEELPPPPPQKKRQITVDSEIRKRLDVDITELHSWITRSEAVLQSPEFAIFRKEGNFSDLKEKVNAIEREKAEKFRKLQDASRSAQALVEQMVNEGVNADSIKQASEQLNSRWIEFCQLLSERLNWLEYQNNIIAFYNQLQQLEQMTTTAENWLKIQPTTPSEPTAIKSQLKICKDEVNRLSGLQPQIERLKIQSIALKEKGQGPMFLDADFVAFTNHFKQVFSDVQAREKELQTIFDTLPPMRYQETMSAIRTWVQQSETKLSIPQLSVTDYEIMEQRLGELQALQSSLQEQQSGLYYLSTTVKEMSKKAPSEISRKYQSEFEEIEGRWKKLSSQLVEHCQKLEEQMNKLRKIQNHIQTLKKWMAEVDVFLKEEWPALGDSEILKKQLKQCRLLVSDIQTIQPSLNSVNEGGQKIKNEAEPEFASRLETELKELNTQWDHMCQQVYARKEALKGGLEKTVSLQKDLSEMHEWMTQAEEEYLERDFEYKTPDELQKAVEEMKRAKEEAQQKEAKVKLLTESVNSVIAQAPPVAQEALKKELETLTTNYQWLCTRLNGKCKTLEEVWACWHELLSYLEKANKWLNEVEFKLKTTENIPGGAEEISEVLDSLENLMRHSEDNPNQIRILAQTLTDGGVMDELINEELETFNSRWRELHEEAVRRQKLLEQSIQSAQETEKSLHLIQESLTFIDKQLAAYIADKVDAAQMPQEAQKIQSDLTSHEISLEEMKKHNQGKEAAQRVLSQIDVAQKKLQDVSMKFRLFQKPANFELRLQESKMILDEVKMHLPALETKSVEQEVVQSQLNHCVNLYKSLSEVKSEVEMVIKTGRQIVQKKQTENPKELDERVTALKLHYNELGAKVTERKQQLEKCLKLSRKMRKEMNVLTEWLAATDMELTKRSAVEGMPSNLDSEVAWGKATQKEIEKQKVHLKSITEVGEALKTVLGKKETLVEDKLSLLNSNWIAVTSRAEEWLNLLLEYQKHMETFDQNVDHITKWIIQADTLLDESEKKKPQQKEDVLKRLKAELNDIRPKVDSTRDQAANLMANRGDHCRKLVEPQISELNHRFAAISHRIKTGKASIPLKELEQFNSDIQKLLEPLEAEIQQGVNLKEEDFNKDMNEDNEGTVKELLQRGDNLQQRITDERKREEIKIKQQLLQTKHNALKDLRSQRRKKALEISHQWYQYKRQADDLLKCLDDIEKKLASLPEPRDERKIKEIDRELQKKKEELNAVRRQAEGLSEDGAAMAVEPTQIQLSKRWREIESKFAQFRRLNFAQIHTVREETMMVMTEDMPLEISYVPSTYLTEITHVSQALLEVEQLLNAPDLCAKDFEDLFKQEESLKNIKDSLQQSSGRIDIIHSKKTAALQSATPVERVKLQEALSQLDFQWEKVNKMYKDRQGRFDRSVEKWRRFHYDIKIFNQWLTEAEQFLRKTQIPENWEHAKYKWYLKELQDGIGQRQTVVRTLNATGEEIIQQSSKTDASILQEKLGSLNLRWQEVCKQLSDRKKRLEEQKNILSEFQRDLNEFVLWLEEADNIASIPLEPGKEQQLKEKLEQVKLLVEELPLRQGILKQLNETGGPVLVSAPISPEEQDKLENKLKQTNLQWIKVSRALPEKQGEIEAQIKDLGQLEKKLEDLEEQLNHLLLWLSPIRNQLEIYNQPNQEGPFDVQETEIAVQAKQPDVEEILSKGQHLYKEKPATQPVKRKLEDLSSEWKAVNRLLQELRAKQPDLAPGLTTIGASPTQTVTLVTQPVVTKETAISKLEMPSSLMLEVPALADFNRAWTELTDWLSLLDQVIKSQRVMVGDLEDINEMIIKQKATMQDLEQRRPQLEELITAAQNLKNKTSNQEARTIITDRIERIQNQWDEVQEHLQNRRQQLNEMLKDSTQWLEAKEEAEQVLGQARAKLESWKEGPYTVDAIQKKITETKQLAKDLRQWQTNVDVANDLALKLLRDYSADDTRKVHMITENINASWRSIHKRVSEREAALEETHRLLQQFPLDLEKFLAWLTEAETTANVLQDATRKERLLEDSKGVKELMKQWQDLQGEIEAHTDVYHNLDENSQKILRSLEGSDDAVLLQRRLDNMNFKWSELRKKSLNIRSHLEASSDQWKRLHLSLQELLVWLQLKDDELSRQAPIGGDFPAVQKQNDVHRAFKRELKTKEPVIMSTLETVRIFLTEQPLEGLEKLYQEPRELPPEERAQNVTRLLRKQAEEVNTEWEKLNLHSADWQRKIDETLERLQELQEATDELDLKLRQAEVIKGSWQPVGDLLIDSLQDHLEKVKALRGEIAPLKENVSHVNDLARQLTTLGIQLSPYNLSTLEDLNTRWKLLQVAVEDRVRQLHEAHRDFGPASQHFLSTSVQGPWERAISPNKVPYYINHETQTTCWDHPKMTELYQSLADLNNVRFSAYRTAMKLRRLQKALCLDLLSLSAACDALDQHNLKQNDQPMDILQIINCLTTIYDRLEQEHNNLVNVPLCVDMCLNWLLNVYDTGRTGRIRVLSFKTGIISLCKAHLEDKYRYLFKQVASSTGFCDQRRLGLLLHDSIQIPRQLGEVASFGGSNIEPSVRSCFQFANNKPEIEAALFLDWMRLEPQSMVWLPVLHRVAAAETAKHQAKCNICKECPIIGFRYRSLKHFNYDICQSCFFSGRVAKGHKMHYPMVEYCTPTTSGEDVRDFAKVLKNKFRTKRYFAKHPRMGYLPVQTVLEGDNMETPVTLINFWPVDSAPASSPQLSHDDTHSRIEHYASRLAEMENSNGSYLNDSISPNESIDDEHLLIQHYCQSLNQDSPLSQPRSPAQILISLESEERGELERILADLEEENRNLQAEYDRLKQQHEHKGLSPLPSPPEMMPTSPQSPRDAELIAEAKLLRQHKGRLEARMQILEDHNKQLESQLHRLRQLLEQPQAEAKVNGTTVSSPSTSLQRSDSSQPMLLRVVGSQTSDSMGEEDLLSPPQDTSTGLEEVMEQLNNSFPSSRGRNTPGKPMREDTM

SEQ ID NO: 21 - DNA, 6003 bp, Artificial Sequence
  Penetratin-truncated-dystrophin fusion protein nucleotide sequence
  misc_feature (1)..(6003)
atgcgccagatcaagatctacttccagaaccgccgcatgaaatggaaaaaaatgctttggtgggaagaagtagaggactgttatgaaagagaagatgttcaaaagaaaacattcacaaaatgggtaaatgcacaattttctaagtttgggaagcagcatattgagaacctcttcagtgacctacaggatgggaggcgcctcctagacctcctcgaaggcctgacagggcaaaaactgccaaaagaaaaaggatccacaagagttcatgccctgaacaatgtcaacaaggcactgcgggttttgcagaacaataatgttgatttagtgaatattggaagtactgacatcgtagatggaaatcataaactgactcttggtttgatttggaatataatcctccactggcaggtcaaaaatgtaatgaaaaatatcatggctggattgcaacaaaccaacagtgaaaagattctcctgagctgggtccgacaatcaactcgtaattatccacaggttaatgtaatcaacttcaccaccagctggtctgatggcctggctttgaatgctctcatccatagtcataggccagacctatttgactggaatagtgtggtttgccagcagtcagccacacaacgactggaacatgcattcaacatcgccagatatcaattaggcatagagaaactactcgatcctgaagatgttgataccacctatccagataagaagtccatcttaatgtacatcacatcactcttccaagttttgcctcaacaagtgagcattgaagccatccaggaagtggaaatgttgccaaggccacctaaagtgactaaagaagaacattttcagttacatcatcaaatgcactattctcaacagatcacggtcagtctagcacagggatatgagagaacttcttcccctaagcctcgattcaagagctatgcctacacacaggctgcttatgtcaccacctctgaccctacacggagcccatttccttcacagcatttggaagctcctgaagacaagtcatttggcagttcattgatggagagtgaagtaaacctggaccgttatcaaacagctttagaagaagtattatcgtggcttctttctgctgaggacacattgcaagcacaaggagagatttctaatgatgtggaagtggtgaaagaccagtttcatactcatgaggggtacatgatggatttgacagcccatcagggccgggttggtaatattctacaattgggaagtaagctgattggaacaggaaaattatcagaagatgaagaaactgaagtacaagagcagatgaatctcctaaattcaagatgggaatgcctcagggtagctagcatggaaaaacaaagcaatttacatagagttttaatggatctccagaatcagaaactgaaagagttgaatgactggctaacaaaaacagaagaaagaacaaggaaaatggaggaagagcctcttggacctgatcttgaagacctaaaacgccaagtacaacaacataaggtgcttcaagaagatctagaacaagaacaagtcagggtcaattctctcactcacatggtggtggtagttgatgaatctagtggagatcacgcaactgctgctttggaagaacaacttaaggtattgggagatcgatgggcaaacatctgtagatggacagaagaccgctgggttcttttacaagacatccttctcaaatggcaacgtcttactgaagaacagtgcctttttagtgcatggctttcagaaaaagaagatgcagtgaacaagattcacacaactggctttaaagatcaaaatgaaatgttatcaagtcttcaaaaactggccgttttaaaagcggatctagaaaagaaaaagcaatccatgggcaaactgtattcactcaaacaagatcttctttcaacactgaagaataagtcagtgacccagaagacggaagcatggctggataactttgcccggtgttgggataatttagtccaaaaacttgaaaagagtacagcacaggaaactgaaatagcagttcaagctaaacaaccggatgtggaagagattttgtctaaagggcagcatttgtacaaggaaaaaccagccactcagccagtgaagaggaagttagaagatctgagctctgagtggaaggcggtaaaccgtttacttcaagagctgagggcaaagcagcctgacctagctcctggactgaccactattggagcctctcctactcagactgttactctggtgacacaacctgtggttactaaggaaactgccatctccaaactagaaatgccatcttccttgatgttggaggtacctgctctggcagatttcaaccgggcttggacagaacttaccgactggctttctctgcttgatcaagttataaaatcacagagggtgatggtgggtgaccttgaggatatcaacgagatgatcatcaagcagaaggcaacaatgcaggatttggaacagaggcgtccccagttggaagaactcattaccgctgcccaaaatttgaaaaacaagaccagcaatcaagaggctagaacaatcattacggatcgaattgaaagaattcagaatcagtgggatgaagtacaagaacaccttcagaaccggaggcaacagttgaatgaaatgttaaaggattcaacacaatggctggaagctaaggaagaagctgagcaggtcttaggacaggccagagccaagcttgagtcatggaaggagggtccctatacagtagatgcaatccaaaagaaaatcacagaaaccaagcagttggccaaagacctccgccagtggcagacaaatgtagatgtggcaaatgacttggccctgaaacttctccgggattattctgcagatgataccagaaaagtccacatgataacagagaatatcaatgcctcttggagaagcattcataaaagggtgagtgagcgagaggctgctttggaagaaactcatagattactgcaacagttccccctggacctggaaaagtttcttgcctggcttacagaagctgaaacaactgccaatgtcctacaggatgctacccgtaaggaaaggctcctagaagactccaagggagtaaaagagctgatgaaacaatggcaagacctccaaggtgaaattgaagctcacacagatgtttatcacaacctggatgaaaacagccaaaaaatcctgagatccctggaaggttccgatgatgcagtcctgttacaaagacgtttggataacatgaacttcaagtggagtgaacttcggaaaaagtctctcaacattaggtcccatttggaagccagttctgaccagtggaagcgtctgcacctttctctgcaggaacttctggtgtggctacagctgaaagatgatgaattaagccggcaggcacctattggaggcgactttccagcagttcagaagcagaacgatgtacatagggccttcaagagggaattgaaaactaaagaacctgtaatcatgagtactcttgagactgtacgaatatttctgacagagcagcctttggaaggactagagaaactctaccaggagcccagagagctgcctcctgaggagagagcccagaatgtcactcggcttctacgaaagcaggctgaggaggtcaatactgagtgggaaaaattgaacctgcactccgctgactggcagagaaaaatagatgagacccttgaaagactccaggaacttcaagaggccacggatgagctggacctcaagctgcgccaagctgaggtgatcaagggatcctggcagcccgtgggcgatctcctcattgactctctccaagatcacctcgagaaagtcaaggcacttcgaggagaaattgcgcctctgaaagagaacgtgagccacgtcaatgaccttgctcgccagcttaccactttgggcattcagctctcaccgtataacctcagcactctggaagacctgaacaccagatggaagcttctgcaggtggccgtcgaggaccgagtcaggcagctgcatgaagcccacagggactttggtccagcatctcagcactttctttccacgtctgtccagggtccctgggagagagccatctcgccaaacaaagtgccctactatatcaaccacgagactcaaacaacttgctgggaccatcccaaaatgacagagctctaccagtctttagctgacctgaataatgtcagattctcagcttataggactgccatgaaactccgaagactgcagaaggccctttgcttggatctcttgagcctgtcagctgcatgtgatgccttggaccagcacaacctcaagcaaaatgaccagcccatggatatcctgcagattattaattgtttgaccactatttatgaccgcctggagcaagagcacaacaatttggtcaacgtccctctctgcgtggatatgtgtctgaactggctgctgaatgtttatgatacgggacgaacagggaggatccgtgtcctgtcttttaaaactggcatcatttccctgtgtaaagcacatttggaagacaagtacagataccttttcaagcaagtggcaagttcaacaggattttgtgaccagcgcaggctgggcctccttctgcatgattctatccaaattccaagacagttgggtgaagttgcatcctttgggggcagtaacattgagccaagtgtccggagctgcttccaatttgctaataataagccagagatcgaagcggccctcttcctagactggatgagactggaaccccagtccatggtgtggctgcccgtcctgcacagagtggctgctgcagaaactgccaagcatcaggccaaatgtaacatctgcaaagagtgtccaatcattggattcaggtacaggagtctaaagcactttaattatgacatctgccaaagctgctttttttctggtcgagttgcaaaaggccataaaatgcactatcccatggtggaatattgcactccgactacatcaggagaagatgttcgagactttgccaaggtactaaaaaacaaatttcgaaccaaaaggtattttgcgaagcatccccgaatgggctacctgccagtgcagactgtcttagagggggacaacatggaaactcccgttactctgatcaacttctggccagtagattctgcgcctgcctcgtcccctcagctttcacacgatgatactcattcacgcattgaacattatgctagcaggctagcagaaatggaaaacagcaatggatcttatctaaatgatagcatctctcctaatgagagcatagatgatgaacatttgttaatccagcattactgccaaagtttgaaccaggactcccccctgagccagcctcgtagtcctgcccagatcttgatttccttagagagtgaggaaagaggggagctagagagaatcctagcagatcttgaggaagaaaacaggaatctgcaagcagaatatgaccgtctaaagcagcagcacgaacataaaggcctgtccccactgccgtcccctcctgaaatgatgcccacctctccccagagtccccgggatgctgagctcattgctgaggccaagctactgcgtcaacacaaaggccgcctggaagccaggatgcaaatcctggaagaccacaataaacagctggagtcacagttacacaggctaaggcagctgctggagcaaccccaggcagaggccaaagtgaatggcacaacggtgtcctctccttctacctctctacagaggtccgacagcagtcagcctatgctgctccgagtggttggcagtcaaacttcggactccatgggtgaggaagatcttctcagtcctccccaggacacaagcacagggttagaggaggtgatggagcaactcaacaactccttccctagttcaagaggaagaaatacccctggaaagccaatgagagaggacacaatgtag

SEQ ID NO: 22 - protein, 2000 aa, Artificial Sequence
  Penetratin-truncated-dystrophin fusion protein amino acid sequence
  MISC_FEATURE (1)..(2000)
MRQIKIYFQNRRMKWKKMLWWEEVEDCYEREDVQKKTFTKWVNAQFSKFGKQHIENLFSDLQDGRRLLDLLEGLTGQKLPKEKGSTRVHALNNVNKALRVLQNNNVDLVNIGSTDIVDGNHKLTLGLIWNIILHWQVKNVMKNIMAGLQQTNSEKILLSWVRQSTRNYPQVNVINFTTSWSDGLALNALIHSHRPDLFDWNSVVCQQSATQRLEHAFNIARYQLGIEKLLDPEDVDTTYPDKKSILMYITSLFQVLPQQVSIEAIQEVEMLPRPPKVTKEEHFQLHHQMHYSQQITVSLAQGYERTSSPKPRFKSYAYTQAAYVTTSDPTRSPFPSQHLEAPEDKSFGSSLMESEVNLDRYQTALEEVLSWLLSAEDTLQAQGEISNDVEVVKDQFHTHEGYMMDLTAHQGRVGNILQLGSKLIGTGKLSEDEETEVQEQMNLLNSRWECLRVASMEKQSNLHRVLMDLQNQKLKELNDWLTKTEERTRKMEEEPLGPDLEDLKRQVQQHKVLQEDLEQEQVRVNSLTHMVVVVDESSGDHATAALEEQLKVLGDRWANICRWTEDRWVLLQDILLKWQRLTEEQCLFSAWLSEKEDAVNKIHTTGFKDQNEMLSSLQKLAVLKADLEKKKQSMGKLYSLKQDLLSTLKNKSVTQKTEAWLDNFARCWDNLVQKLEKSTAQETEIAVQAKQPDVEEILSKGQHLYKEKPATQPVKRKLEDLSSEWKAVNRLLQELRAKQPDLAPGLTTIGASPTQTVTLVTQPVVTKETAISKLEMPSSLMLEVPALADFNRAWTELTDWLSLLDQVIKSQRVMVGDLEDINEMIIKQKATMQDLEQRRPQLEELITAAQNLKNKTSNQEARTIITDRIERIQNQWDEVQEHLQNRRQQLNEMLKDSTQWLEAKEEAEQVLGQARAKLESWKEGPYTVDAIQKKITETKQLAKDLRQWQTNVDVANDLALKLLRDYSADDTRKVHMITENINASWRSIHKRVSEREAALEETHRLLQQFPLDLEKFLAWLTEAETTANVLQDATRKERLLEDSKGVKELMKQWQDLQGEIEAHTDVYHNLDENSQKILRSLEGSDDAVLLQRRLDNMNFKWSELRKKSLNIRSHLEASSDQWKRLHLSLQELLVWLQLKDDELSRQAPIGGDFPAVQKQNDVHRAFKRELKTKEPVIMSTLETVRIFLTEQPLEGLEKLYQEPRELPPEERAQNVTRLLRKQAEEVNTEWEKLNLHSADWQRKIDETLERLQELQEATDELDLKLRQAEVIKGSWQPVGDLLIDSLQDHLEKVKALRGEIAPLKENVSHVNDLARQLTTLGIQLSPYNLSTLEDLNTRWKLLQVAVEDRVRQLHEAHRDFGPASQHFLSTSVQGPWERAISPNKVPYYINHETQTTCWDHPKMTELYQSLADLNNVRFSAYRTAMKLRRLQKALCLDLLSLSAACDALDQHNLKQNDQPMDILQIINCLTTIYDRLEQEHNNLVNVPLCVDMCLNWLLNVYDTGRTGRIRVLSFKTGIISLCKAHLEDKYRYLFKQVASSTGFCDQRRLGLLLHDSIQIPRQLGEVASFGGSNIEPSVRSCFQFANNKPEIEAALFLDWMRLEPQSMVWLPVLHRVAAAETAKHQAKCNICKECPIIGFRYRSLKHFNYDICQSCFFSGRVAKGHKMHYPMVEYCTPTTSGEDVRDFAKVLKNKFRTKRYFAKHPRMGYLPVQTVLEGDNMETPVTLINFWPVDSAPASSPQLSHDDTHSRIEHYASRLAEMENSNGSYLNDSISPNESIDDEHLLIQHYCQSLNQDSPLSQPRSPAQILISLESEERGELERILADLEEENRNLQAEYDRLKQQHEHKGLSPLPSPPEMMPTSPQSPRDAELIAEAKLLRQHKGRLEARMQILEDHNKQLESQLHRLRQLLEQPQAEAKVNGTTVSSPSTSLQRSDSSQPMLLRVVGSQTSDSMGEEDLLSPPQDTSTGLEEVMEQLNNSFPSSRGRNTPGKPMREDTM

SEQ ID NO: 23 - DNA, 6210 bp, Artificial Sequence
  Tat-truncated-dystrophin fusion protein nucleotide sequence
  misc_feature (1)..(6210)
atggagccagtagatcctagactagagccctggaagcaccctggaagtcagcctaaaactgcatgcaccaattgctattgtaaaaagtgttgctttcattgccaagtttgtttcataacaaaggccttaggcatctcctatggcaggaagaagcggagacagcgacgaagagctcctcaaggcagtcagactcatcaagtaagcttatcaaagcaacccacctcccaatcccgaggggacccgacaggcccgaaggaaatgctttggtgggaagaagtagaggactgttatgaaagagaagatgttcaaaagaaaacattcacaaaatgggtaaatgcacaattttctaagtttgggaagcagcatattgagaacctcttcagtgacctacaggatgggaggcgcctcctagacctcctcgaaggcctgacagggcaaaaactgccaaaagaaaaaggatccacaagagttcatgccctgaacaatgtcaacaaggcactgcgggttttgcagaacaataatgttgatttagtgaatattggaagtactgacatcgtagatggaaatcataaactgactcttggtttgatttggaatataatcctccactggcaggtcaaaaatgtaatgaaaaatatcatggctggattgcaacaaaccaacagtgaaaagattctcctgagctgggtccgacaatcaactcgtaattatccacaggttaatgtaatcaacttcaccaccagctggtctgatggcctggctttgaatgctctcatccatagtcataggccagacctatttgactggaatagtgtggtttgccagcagtcagccacacaacgactggaacatgcattcaacatcgccagatatcaattaggcatagagaaactactcgatcctgaagatgttgataccacctatccagataagaagtccatcttaatgtacatcacatcactcttccaagttttgcctcaacaagtgagcattgaagccatccaggaagtggaaatgttgccaaggccacctaaagtgactaaagaagaacattttcagttacatcatcaaatgcactattctcaacagatcacggtcagtctagcacagggatatgagagaacttcttcccctaagcctcgattcaagagctatgcctacacacaggctgcttatgtcaccacctctgaccctacacggagcccatttccttcacagcatttggaagctcctgaagacaagtcatttggcagttcattgatggagagtgaagtaaacctggaccgttatcaaacagctttagaagaagtattatcgtggcttctttctgctgaggacacattgcaagcacaaggagagatttctaatgatgtggaagtggtgaaagaccagtttcatactcatgaggggtacatgatggatttgacagcccatcagggccgggttggtaatattctacaattgggaagtaagctgattggaacaggaaaattatcagaagatgaagaaactgaagtacaagagcagatgaatctcctaaattcaagatgggaatgcctcagggtagctagcatggaaaaacaaagcaatttacatagagttttaatggatctccagaatcagaaactgaaagagttgaatgactggctaacaaaaacagaagaaagaacaaggaaaatggaggaagagcctcttggacctgatcttgaagacctaaaacgccaagtacaacaacataaggtgcttcaagaagatctagaacaagaacaagtcagggtcaattctctcactcacatggtggtggtagttgatgaatctagtggagatcacgcaactgctgctttggaagaacaacttaaggtattgggagatcgatgggcaaacatctgtagatggacagaagaccgctgggttcttttacaagacatccttctcaaatggcaacgtcttactgaagaacagtgcctttttagtgcatggctttcagaaaaagaagatgcagtgaacaagattcacacaactggctttaaagatcaaaatgaaatgttatcaagtcttcaaaaactggccgttttaaaagcggatctagaaaagaaaaagcaatccatgggcaaactgtattcactcaaacaagatcttctttcaacactgaagaataagtcagtgacccagaagacggaagcatggctggataactttgcccggtgttgggataatttagtccaaaaacttgaaaagagtacagcacaggaaactgaaatagcagttcaagctaaacaaccggatgtggaagagattttgtctaaagggcagcatttgtacaaggaaaaaccagccactcagccagtgaagaggaagttagaagatctgagctctgagtggaaggcggtaaaccgtttacttcaagagctgagggcaaagcagcctgacctagctcctggactgaccactattggagcctctcctactcagactgttactctggtgacacaacctgtggttactaaggaaactgccatctccaaactagaaatgccatcttccttgatgttggaggtacctgctctggcagatttcaaccgggcttggacagaacttaccgactggctttctctgcttgatcaagttataaaatcacagagggtgatggtgggtgaccttgaggatatcaacgagatgatcatcaagcagaaggcaacaatgcaggatttggaacagaggcgtccccagttggaagaactcattaccgctgcccaaaatttgaaaaacaagaccagcaatcaagaggctagaacaatcattacggatcgaattgaaagaattcagaatcagtgggatgaagtacaagaacaccttcagaaccggaggcaacagttgaatgaaatgttaaaggattcaacacaatggctggaagctaaggaagaagctgagcaggtcttaggacaggccagagccaagcttgagtcatggaaggagggtccctatacagtagatgcaatccaaaagaaaatcacagaaaccaagcagttggccaaagacctccgccagtggcagacaaatgtagatgtggcaaatgacttggccctgaaacttctccgggattattctgcagatgataccagaaaagtccacatgataacagagaatatcaatgcctcttggagaagcattcataaaagggtgagtgagcgagaggctgctttggaagaaactcatagattactgcaacagttccccctggacctggaaaagtttcttgcctggcttacagaagctgaaacaactgccaatgtcctacaggatgctacccgtaaggaaaggctcctagaagactccaagggagtaaaagagctgatgaaacaatggcaagacctccaaggtgaaattgaagctcacacagatgtttatcacaacctggatgaaaacagccaaaaaatcctgagatccctggaaggttccgatgatgcagtcctgttacaaagacgtttggataacatgaacttcaagtggagtgaacttcggaaaaagtctctcaacattaggtcccatttggaagccagttctgaccagtggaagcgtctgcacctttctctgcaggaacttctggtgtggctacagctgaaagatgatgaattaagccggcaggcacctattggaggcgactttccagcagttcagaagcagaacgatgtacatagggccttcaagagggaattgaaaactaaagaacctgtaatcatgagtactcttgagactgtacgaatatttctgacagagcagcctttggaaggactagagaaactctaccaggagcccagagagctgcctcctgaggagagagcccagaatgtcactcggcttctacgaaagcaggctgaggaggtcaatactgagtgggaaaaattgaacctgcactccgctgactggcagagaaaaatagatgagacccttgaaagactccaggaacttcaagaggccacggatgagctggacctcaagctgcgccaagctgaggtgatcaagggatcctggcagcccgtgggcgatctcctcattgactctctccaagatcacctcgagaaagtcaaggcacttcgaggagaaattgcgcctctgaaagagaacgtgagccacgtcaatgaccttgctcgccagcttaccactttgggcattcagctctcaccgtataacctcagcactctggaagacctgaacaccagatggaagcttctgcaggtggccgtcgaggaccgagtcaggcagctgcatgaagcccacagggactttggtccagcatctcagcactttctttccacgtctgtccagggtccctgggagagagccatctcgccaaacaaagtgccctactatatcaaccacgagactcaaacaacttgctgggaccatcccaaaatgacagagctctaccagtctttagctgacctgaataatgtcagattctcagcttataggactgccatgaaactccgaagactgcagaaggccctttgcttggatctcttgagcctgtcagctgcatgtgatgccttggaccagcacaacctcaagcaaaatgaccagcccatggatatcctgcagattattaattgtttgaccactatttatgaccgcctggagcaagagcacaacaatttggtcaacgtccctctctgcgtggatatgtgtctgaactggctgctgaatgtttatgatacgggacgaacagggaggatccgtgtcctgtcttttaaaactggcatcatttccctgtgtaaagcacatttggaagacaagtacagataccttttcaagcaagtggcaagttcaacaggattttgtgaccagcgcaggctgggcctccttctgcatgattctatccaaattccaagacagttgggtgaagttgcatcctttgggggcagtaacattgagccaagtgtccggagctgcttccaatttgctaataataagccagagatcgaagcggccctcttcctagactggatgagactggaaccccagtccatggtgtggctgcccgtcctgcacagagtggctgctgcagaaactgccaagcatcaggccaaatgtaacatctgcaaagagtgtccaatcattggattcaggtacaggagtctaaagcactttaattatgacatctgccaaagctgctttttttctggtcgagttgcaaaaggccataaaatgcactatcccatggtggaatattgcactccgactacatcaggagaagatgttcgagactttgccaaggtactaaaaaacaaatttcgaaccaaaaggtattttgcgaagcatccccgaatgggctacctgccagtgcagactgtcttagagggggacaacatggaaactcccgttactctgatcaacttctggccagtagattctgcgcctgcctcgtcccctcagctttcacacgatgatactcattcacgcattgaacattatgctagcaggctagcagaaatggaaaacagcaatggatcttatctaaatgatagcatctctcctaatgagagcatagatgatgaacatttgttaatccagcattactgccaaagtttgaaccaggactcccccctgagccagcctcgtagtcctgcccagatcttgatttccttagagagtgaggaaagaggggagctagagagaatcctagcagatcttgaggaagaaaacaggaatctgcaagcagaatatgaccgtctaaagcagcagcacgaacataaaggcctgtccccactgccgtcccctcctgaaatgatgcccacctctccccagagtccccgggatgctgagctcattgctgaggccaagctactgcgtcaacacaaaggccgcctggaagccaggatgcaaatcctggaagaccacaataaacagctggagtcacagttacacaggctaaggcagctgctggagcaaccccaggcagaggccaaagtgaatggcacaacggtgtcctctccttctacctctctacagaggtccgacagcagtcagcctatgctgctccgagtggttggcagtcaaacttcggactccatgggtgaggaagatcttctcagtcctccccaggacacaagcacagggttagaggaggtgatggagcaactcaacaactccttccctagttcaagaggaagaaatacccctggaaagccaatgagagaggacacaatgtag

SEQ ID NO: 24 - protein, 2069 aa, Artificial Sequence
  Tat-truncated-dystrophin fusion protein amino acid sequence
  MISC_FEATURE (1)..(2069)
MEPVDPRLEPWKHPGSQPKTACTNCYCKKCCFHCQVCFITKALGISYGRKKRRQRRRAPQGSQTHQVSLSKQPTSQSRGDPTGPKEMLWWEEVEDCYEREDVQKKTFTKWVNAQFSKFGKQHIENLFSDLQDGRRLLDLLEGLTGQKLPKEKGSTRVHALNNVNKALRVLQNNNVDLVNIGSTDIVDGNHKLTLGLIWNIILHWQVKNVMKNIMAGLQQTNSEKILLSWVRQSTRNYPQVNVINFTTSWSDGLALNALIHSHRPDLFDWNSVVCQQSATQRLEHAFNIARYQLGIEKLLDPEDVDTTYPDKKSILMYITSLFQVLPQQVSIEAIQEVEMLPRPPKVTKEEHFQLHHQMHYSQQITVSLAQGYERTSSPKPRFKSYAYTQAAYVTTSDPTRSPFPSQHLEAPEDKSFGSSLMESEVNLDRYQTALEEVLSWLLSAEDTLQAQGEISNDVEVVKDQFHTHEGYMMDLTAHQGRVGNILQLGSKLIGTGKLSEDEETEVQEQMNLLNSRWECLRVASMEKQSNLHRVLMDLQNQKLKELNDWLTKTEERTRKMEEEPLGPDLEDLKRQVQQHKVLQEDLEQEQVRVNSLTHMVVVVDESSGDHATAALEEQLKVLGDRWANICRWTEDRWVLLQDILLKWQRLTEEQCLFSAWLSEKEDAVNKIHTTGFKDQNEMLSSLQKLAVLKADLEKKKQSMGKLYSLKQDLLSTLKNKSVTQKTEAWLDNFARCWDNLVQKLEKSTAQETEIAVQAKQPDVEEILSKGQHLYKEKPATQPVKRKLEDLSSEWKAVNRLLQELRAKQPDLAPGLTTIGASPTQTVTLVTQPVVTKETAISKLEMPSSLMLEVPALADFNRAWTELTDWLSLLDQVIKSQRVMVGDLEDINEMIIKQKATMQDLEQRRPQLEELITAAQNLKNKTSNQEARTIITDRIERIQNQWDEVQEHLQNRRQQLNEMLKDSTQWLEAKEEAEQVLGQARAKLESWKEGPYTVDAIQKKITETKQLAKDLRQWQTNVDVANDLALKLLRDYSADDTRKVHMITENINASWRSIHKRVSEREAALEETHRLLQQFPLDLEKFLAWLTEAETTANVLQDATRKERLLEDSKGVKELMKQWQDLQGEIEAHTDVYHNLDENSQKILRSLEGSDDAVLLQRRLDNMNFKWSELRKKSLNIRSHLEASSDQWKRLHLSLQELLVWLQLKDDELSRQAPIGGDFPAVQKQNDVHRAFKRELKTKEPVIMSTLETVRIFLTEQPLEGLEKLYQEPRELPPEERAQNVTRLLRKQAEEVNTEWEKLNLHSADWQRKIDETLERLQELQEATDELDLKLRQAEVIKGSWQPVGDLLIDSLQDHLEKVKALRGEIAPLKENVSHVNDLARQLTTLGIQLSPYNLSTLEDLNTRWKLLQVAVEDRVRQLHEAHRDFGPASQHFLSTSVQGPWERAISPNKVPYYINHETQTTCWDHPKMTELYQSLADLNNVRFSAYRTAMKLRRLQKALCLDLLSLSAACDALDQHNLKQNDQPMDILQIINCLTTIYDRLEQEHNNLVNVPLCVDMCLNWLLNVYDTGRTGRIRVLSFKTGIISLCKAHLEDKYRYLFKQVASSTGFCDQRRLGLLLHDSIQIPRQLGEVASFGGSNIEPSVRSCFQFANNKPEIEAALFLDWMRLEPQSMVWLPVLHRVAAAETAKHQAKCNICKECPIIGFRYRSLKHFNYDICQSCFFSGRVAKGHKMHYPMVEYCTPTTSGEDVRDFAKVLKNKFRTKRYFAKHPRMGYLPVQTVLEGDNMETPVTLINFWPVDSAPASSPQLSHDDTHSRIEHYASRLAEMENSNGSYLNDSISPNESIDDEHLLIQHYCQSLNQDSPLSQPRSPAQILISLESEERGELERILADLEEENRNLQAEYDRLKQQHEHKGLSPLPSPPEMMPTSPQSPRDAELIAEAKLLRQHKGRLEARMQILEDHNKQLESQLHRLRQLLEQPQAEAKVNGTTVSSPSTSLQRSDSSQPMLLRVVGSQTSDSMGEEDLLSPPQDTSTGLEEVMEQLNNSFPSSRGRNTPGKPMREDTM

SEQ ID NO: 25 - DNA, 6036 bp, Artificial Sequence
  Transportan-truncated-dystrophin fusion protein nucleotide sequence
  misc_feature (1)..(6036)
atgggttggactttaaattctgctggttatttattaggtaaaattaatttaaaagctttagctgccttggccaagaagatcttgatgctttggtgggaagaagtagaggactgttatgaaagagaagatgttcaaaagaaaacattcacaaaatgggtaaatgcacaattttctaagtttgggaagcagcatattgagaacctcttcagtgacctacaggatgggaggcgcctcctagacctcctcgaaggcctgacagggcaaaaactgccaaaagaaaaaggatccacaagagttcatgccctgaacaatgtcaacaaggcactgcgggttttgcagaacaataatgttgatttagtgaatattggaagtactgacatcgtagatggaaatcataaactgactcttggtttgatttggaatataatcctccactggcaggtcaaaaatgtaatgaaaaatatcatggctggattgcaacaaaccaacagtgaaaagattctcctgagctgggtccgacaatcaactcgtaattatccacaggttaatgtaatcaacttcaccaccagctggtctgatggcctggctttgaatgctctcatccatagtcataggccagacctatttgactggaatagtgtggtttgccagcagtcagccacacaacgactggaacatgcattcaacatcgccagatatcaattaggcatagagaaactactcgatcctgaagatgttgataccacctatccagataagaagtccatcttaatgtacatcacatcactcttccaagttttgcctcaacaagtgagcattgaagccatccaggaagtggaaatgttgccaaggccacctaaagtgactaaagaagaacattttcagttacatcatcaaatgcactattctcaacagatcacggtcagtctagcacagggatatgagagaacttcttcccctaagcctcgattcaagagctatgcctacacacaggctgcttatgtcaccacctctgaccctacacggagcccatttccttcacagcatttggaagctcctgaagacaagtcatttggcagttcattgatggagagtgaagtaaacctggaccgttatcaaacagctttagaagaagtattatcgtggcttctttctgctgaggacacattgcaagcacaaggagagatttctaatgatgtggaagtggtgaaagaccagtttcatactcatgaggggtacatgatggatttgacagcccatcagggccgggttggtaatattctacaattgggaagtaagctgattggaacaggaaaattatcagaagatgaagaaactgaagtacaagagcagatgaatctcctaaattcaagatgggaatgcctcagggtagctagcatggaaaaacaaagcaatttacatagagttttaatggatctccagaatcagaaactgaaagagttgaatgactggctaacaaaaacagaagaaagaacaaggaaaatggaggaagagcctcttggacctgatcttgaagacctaaaacgccaagtacaacaacataaggtgcttcaagaagatctagaacaagaacaagtcagggtcaattctctcactcacatggtggtggtagttgatgaatctagtggagatcacgcaactgctgctttggaagaacaacttaaggtattgggagatcgatgggcaaacatctgtagatggacagaagaccgctgggttcttttacaagacatccttctcaaatggcaacgtcttactgaagaacagtgcctttttagtgcatggctttcagaaaaagaagatgcagtgaacaagattcacacaactggctttaaagatcaaaatgaaatgttatcaagtcttcaaaaactggccgttttaaaagcggatctagaaaagaaaaagcaatccatgggcaaactgtattcactcaaacaagatcttctttcaacactgaagaataagtcagtgacccagaagacggaagcatggctggataactttgcccggtgttgggataatttagtccaaaaacttgaaaagagtacagcacaggaaactgaaatagcagttcaagctaaacaaccggatgtggaagagattttgtctaaagggcagcatttgtacaaggaaaaaccagccactcagccagtgaagaggaagttagaagatctgagctctgagtggaaggcggtaaaccgtttacttcaagagctgagggcaaagcagcctgacctagctcctggactgaccactattggagcctctcctactcagactgttactctggtgacacaacctgtggttactaaggaaactgccatctccaaactagaaatgccatcttccttgatgttggaggtacctgctctggcagatttcaaccgggcttggacagaacttaccgactggctttctctgcttgatcaagttataaaatcacagagggtgatggtgggtgaccttgaggatatcaacgagatgatcatcaagcagaaggcaacaatgcaggatttggaacagaggcgtccccagttggaagaactcattaccgctgcccaaaatttgaaaaacaagaccagcaatcaagaggctagaacaatcattacggatcgaattgaaagaattcagaatcagtgggatgaagtacaagaacaccttcagaaccggaggcaacagttgaatgaaatgttaaaggattcaacacaatggctggaagctaaggaagaagctgagcaggtcttaggacaggccagagccaagcttgagtcatggaaggagggtccctatacagtagatgcaatccaaaagaaaatcacagaaaccaagcagttggccaaagacctccgccagtggcagacaaatgtagatgtggcaaatgacttggccctgaaacttctccgggattattctgcagatgataccagaaaagtccacatgataacagagaatatcaatgcctcttggagaagcattcataaaagggtgagtgagcgagaggctgctttggaagaaactcatagattactgcaacagttccccctggacctggaaaagtttcttgcctggcttacagaagctgaaacaactgccaatgtcctacaggatgctacccgtaaggaaaggctcctagaagactccaagggagtaaaagagctgatgaaacaatggcaagacctccaaggtgaaattgaagctcacacagatgtttatcacaacctggatgaaaacagccaaaaaatcctgagatccctggaaggttccgatgatgcagtcctgttacaaagacgtttggataacatgaacttcaagtggagtgaacttcggaaaaagtctctcaacattaggtcccatttggaagccagttctgaccagtggaagcgtctgcacctttctctgcaggaacttctggtgtggctacagctgaaagatgatgaattaagccggcaggcacctattggaggcgactttccagcagttcagaagcagaacgatgtacatagggccttcaagagggaattgaaaactaaagaacctgtaatcatgagtactcttgagactgtacgaatatttctgacagagcagcctttggaaggactagagaaactctaccaggagcccagagagctgcctcctgaggagagagcccagaatgtcactcggcttctacgaaagcaggctgaggaggtcaatactgagtgggaaaaattgaacctgcactccgctgactggcagagaaaaatagatgagacccttgaaagactccaggaacttcaagaggccacggatgagctggacctcaagctgcgccaagctgaggtgatcaagggatcctggcagcccgtgggcgatctcctcattgactctctccaagatcacctcgagaaagtcaaggcacttcgaggagaaattgcgcctctgaaagagaacgtgagccacgtcaatgaccttgctcgccagcttaccactttgggcattcagctctcaccgtataacctcagcactctggaagacctgaacaccagatggaagcttctgcaggtggccgtcgaggaccgagtcaggcagctgcatgaagcccacagggactttggtccagcatctcagcactttctttccacgtctgtccagggtccctgggagagagccatctcgccaaacaaagtgccctactatatcaaccacgagactcaaacaacttgctgggaccatcccaaaatgacagagctctaccagtctttagctgacctgaataatgtcagattctcagcttataggactgccatgaaactccgaagactgcagaaggccctttgcttggatctcttgagcctgtcagctgcatgtgatgccttggaccagcacaacctcaagcaaaatgaccagcccatggatatcctgcagattattaattgtttgaccactatttatgaccgcctggagcaagagcacaacaatttggtcaacgtccctctctgcgtggatatgtgtctgaactggctgctgaatgtttatgatacgggacgaacagggaggatccgtgtcctgtcttttaaaactggcatcatttccctgtgtaaagcacatttggaagacaagtacagataccttttcaagcaagtggcaagttcaacaggattttgtgaccagcgcaggctgggcctccttctgcatgattctatccaaattccaagacagttgggtgaagttgcatcctttgggggcagtaacattgagccaagtgtccggagctgcttccaatttgctaataataagccagagatcgaagcggccctcttcctagactggatgagactggaaccccagtccatggtgtggctgcccgtcctgcacagagtggctgctgcagaaactgccaagcatcaggccaaatgtaacatctgcaaagagtgtccaatcattggattcaggtacaggagtctaaagcactttaattatgacatctgccaaagctgctttttttctggtcgagttgcaaaaggccataaaatgcactatcccatggtggaatattgcactccgactacatcaggagaagatgttcgagactttgccaaggtactaaaaaacaaatttcgaaccaaaaggtattttgcgaagcatccccgaatgggctacctgccagtgcagactgtcttagagggggacaacatggaaactcccgttactctgatcaacttctggccagtagattctgcgcctgcctcgtcccctcagctttcacacgatgatactcattcacgcattgaacattatgctagcaggctagcagaaatggaaaacagcaatggatcttatctaaatgatagcatctctcctaatgagagcatagatgatgaacatttgttaatccagcattactgccaaagtttgaaccaggactcccccctgagccagcctcgtagtcctgcccagatcttgatttccttagagagtgaggaaagaggggagctagagagaatcctagcagatcttgaggaagaaaacaggaatctgcaagcagaatatgaccgtctaaagcagcagcacgaacataaaggcctgtccccactgccgtcccctcctgaaatgatgcccacctctccccagagtccccgggatgctgagctcattgctgaggccaagctactgcgtcaacacaaaggccgcctggaagccaggatgcaaatcctggaagaccacaataaacagctggagtcacagttacacaggctaaggcagctgctggagcaaccccaggcagaggccaaagtgaatggcacaacggtgtcctctccttctacctctctacagaggtccgacagcagtcagcctatgctgctccgagtggttggcagtcaaacttcggactccatgggtgaggaagatcttctcagtcctccccaggacacaagcacagggttagaggaggtgatggagcaactcaacaactccttccctagttcaagaggaagaaatacccctggaaagccaatgagagaggacacaatgtag

SEQ ID NO: 26 - protein, 2011 aa, Artificial Sequence
  Transportan-truncated-dystrophin fusion protein amino acid sequence
  MISC_FEATURE (1)..(2011)
MGWTLNSAGYLLGKINLKALAALAKKILMLWWEEVEDCYEREDVQKKTFTKWVNAQFSKFGKQHIENLFSDLQDGRRLLDLLEGLTGQKLPKEKGSTRVHALNNVNKALRVLQNNNVDLVNIGSTDIVDGNHKLTLGLIWNIILHWQVKNVMKNIMAGLQQTNSEKILLSWVRQSTRNYPQVNVINFTTSWSDGLALNALIHSHRPDLFDWNSVVCQQSATQRLEHAFNIARYQLGIEKLLDPEDVDTTYPDKKSILMYITSLFQVLPQQVSIEAIQEVEMLPRPPKVTKEEHFQLHHQMHYSQQITVSLAQGYERTSSPKPRFKSYAYTQAAYVTTSDPTRSPFPSQHLEAPEDKSFGSSLMESEVNLDRYQTALEEVLSWLLSAEDTLQAQGEISNDVEVVKDQFHTHEGYMMDLTAHQGRVGNILQLGSKLIGTGKLSEDEETEVQEQMNLLNSRWECLRVASMEKQSNLHRVLMDLQNQKLKELNDWLTKTEERTRKMEEEPLGPDLEDLKRQVQQHKVLQEDLEQEQVRVNSLTHMVVVVDESSGDHATAALEEQLKVLGDRWANICRWTEDRWVLLQDILLKWQRLTEEQCLFSAWLSEKEDAVNKIHTTGFKDQNEMLSSLQKLAVLKADLEKKKQSMGKLYSLKQDLLSTLKNKSVTQKTEAWLDNFARCWDNLVQKLEKSTAQETEIAVQAKQPDVEEILSKGQHLYKEKPATQPVKRKLEDLSSEWKAVNRLLQELRAKQPDLAPGLTTIGASPTQTVTLVTQPVVTKETAISKLEMPSSLMLEVPALADFNRAWTELTDWLSLLDQVIKSQRVMVGDLEDINEMIIKQKATMQDLEQRRPQLEELITAAQNLKNKTSNQEARTIITDRIERIQNQWDEVQEHLQNRRQQLNEMLKDSTQWLEAKEEAEQVLGQARAKLESWKEGPYTVDAIQKKITETKQLAKDLRQWQTNVDVANDLALKLLRDYSADDTRKVHMITENINASWRSIHKRVSEREAALEETHRLLQQFPLDLEKFLAWLTEAETTANVLQDATRKERLLEDSKGVKELMKQWQDLQGEIEAHTDVYHNLDENSQKILRSLEGSDDAVLLQRRLDNMNFKWSELRKKSLNIRSHLEASSDQWKRLHLSLQELLVWLQLKDDELSRQAPIGGDFPAVQKQNDVHRAFKRELKTKEPVIMSTLETVRIFLTEQPLEGLEKLYQEPRELPPEERAQNVTRLLRKQAEEVNTEWEKLNLHSADWQRKIDETLERLQELQEATDELDLKLRQAEVIKGSWQPVGDLLIDSLQDHLEKVKALRGEIAPLKENVSHVNDLARQLTTLGIQLSPYNLSTLEDLNTRWKLLQVAVEDRVRQLHEAHRDFGPASQHFLSTSVQGPWERAISPNKVPYYINHETQTTCWDHPKMTELYQSLADLNNVRFSAYRTAMKLRRLQKALCLDLLSLSAACDALDQHNLKQNDQPMDILQIINCLTTIYDRLEQEHNNLVNVPLCVDMCLNWLLNVYDTGRTGRIRVLSFKTGIISLCKAHLEDKYRYLFKQVASSTGFCDQRRLGLLLHDSIQIPRQLGEVASFGGSNIEPSVRSCFQFANNKPEIEAALFLDWMRLEPQSMVWLPVLHRVAAAETAKHQAKCNICKECPIIGFRYRSLKHFNYDICQSCFFSGRVAKGHKMHYPMVEYCTPTTSGEDVRDFAKVLKNKFRTKRYFAKHPRMGYLPVQTVLEGDNMETPVTLINFWPVDSAPASSPQLSHDDTHSRIEHYASRLAEMENSNGSYLNDSISPNESIDDEHLLIQHYCQSLNQDSPLSQPRSPAQILISLESEERGELERILADLEEENRNLQAEYDRLKQQHEHKGLSPLPSPPEMMPTSPQSPRDAELIAEAKLLRQHKGRLEARMQILEDHNKQLESQLHRLRQLLEQPQAEAKVNGTTVSSPSTSLQRSDSSQPMLLRVVGSQTSDSMGEEDLLSPPQDTSTGLEEVMEQLNNSFPSSRGRNTPGKPMREDTM

SEQ ID NO: 27 - DNA, 5991 bp, Artificial Sequence
  TfRbp-truncated-dystrophin fusion protein nucleotide sequence
  misc_feature (1)..(5991)
atgactcatcgtcctcctatgtggtctcctgtttggcctatgctttggtgggaagaagtagaggactgttatgaaagagaagatgttcaaaagaaaacattcacaaaatgggtaaatgcacaattttctaagtttgggaagcagcatattgagaacctcttcagtgacctacaggatgggaggcgcctcctagacctcctcgaaggcctgacagggcaaaaactgccaaaagaaaaaggatccacaagagttcatgccctgaacaatgtcaacaaggcactgcgggttttgcagaacaataatgttgatttagtgaatattggaagtactgacatcgtagatggaaatcataaactgactcttggtttgatttggaatataatcctccactggcaggtcaaaaatgtaatgaaaaatatcatggctggattgcaacaaaccaacagtgaaaagattctcctgagctgggtccgacaatcaactcgtaattatccacaggttaatgtaatcaacttcaccaccagctggtctgatggcctggctttgaatgctctcatccatagtcataggccagacctatttgactggaatagtgtggtttgccagcagtcagccacacaacgactggaacatgcattcaacatcgccagatatcaattaggcatagagaaactactcgatcctgaagatgttgataccacctatccagataagaagtccatcttaatgtacatcacatcactcttccaagttttgcctcaacaagtgagcattgaagccatccaggaagtggaaatgttgccaaggccacctaaagtgactaaagaagaacattttcagttacatcatcaaatgcactattctcaacagatcacggtcagtctagcacagggatatgagagaacttcttcccctaagcctcgattcaagagctatgcctacacacaggctgcttatgtcaccacctctgaccctacacggagcccatttccttcacagcatttggaagctcctgaagacaagtcatttggcagttcattgatggagagtgaagtaaacctggaccgttatcaaacagctttagaagaagtattatcgtggcttctttctgctgaggacacattgcaagcacaaggagagatttctaatgatgtggaagtggtgaaagaccagtttcatactcatgaggggtacatgatggatttgacagcccatcagggccgggttggtaatattctacaattgggaagtaagctgattggaacaggaaaattatcagaagatgaagaaactgaagtacaagagcagatgaatctcctaaattcaagatgggaatgcctcagggtagctagcatggaaaaacaaagcaatttacatagagttttaatggatctccagaatcagaaactgaaagagttgaatgactggctaacaaaaacagaagaaagaacaaggaaaatggaggaagagcctcttggacctgatcttgaagacctaaaacgccaagtacaacaacataaggtgcttcaagaagatctagaacaagaacaagtcagggtcaattctctcactcacatggtggtggtagttgatgaatctagtggagatcacgcaactgctgctttggaagaacaacttaaggtattgggagatcgatgggcaaacatctgtagatggacagaagaccgctgggttcttttacaagacatccttctcaaatggcaacgtcttactgaagaacagtgcctttttagtgcatggctttcagaaaaagaagatgcagtgaacaagattcacacaactggctttaaagatcaaaatgaaatgttatcaagtcttcaaaaactggccgttttaaaagcggatctagaaaagaaaaagcaatccatgggcaaactgtattcactcaaacaagatcttctttcaacactgaagaataagtcagtgacccagaagacggaagcatggctggataactttgcccggtgttgggataatttagtccaaaaacttgaaaagagtacagcacaggaaactgaaatagcagttcaagctaaacaaccggatgtggaagagattttgtctaaagggcagcatttgtacaaggaaaaaccagccactcagccagtgaagaggaagttagaagatctgagctctgagtggaaggcggtaaaccgtttacttcaagagctgagggcaaagcagcctgacctagctcctggactgaccactattggagcctctcctactcagactgttactctggtgacacaacctgtggttactaaggaaactgccatctccaaactagaaatgccatcttccttgatgttggaggtacctgctctggcagatttcaaccgggcttggacagaacttaccgactggctttctctgcttgatcaagttataaaatcacagagggtgatggtgggtgaccttgaggatatcaacgagatgatcatcaagcagaaggcaacaatgcaggatttggaacagaggcgtccccagttggaagaactcattaccgctgcccaaaatttgaaaaacaagaccagcaatcaagaggctagaacaatcattacggatcgaattgaaagaattcagaatcagtgggatgaagtacaagaacaccttcagaaccggaggcaacagttgaatgaaatgttaaaggattcaacacaatggctggaagctaaggaagaagctgagcaggtcttaggacaggccagagccaagcttgagtcatggaaggagggtccctatacagtagatgcaatccaaaagaaaatcacagaaaccaagcagttggccaaagacctccgccagtggcagacaaatgtagatgtggcaaatgacttggccctgaaacttctccgggattattctgcagatgataccagaaaagtccacatgataacagagaatatcaatgcctcttggagaagcattcataaaagggtgagtgagcgagaggctgctttggaagaaactcatagattactgcaacagttccccctggacctggaaaagtttcttgcctggcttacagaagctgaaacaactgccaatgtcctacaggatgctacccgtaaggaaaggctcctagaagactccaagggagtaaaagagctgatgaaacaatggcaagacctccaaggtgaaattgaagctcacacagatgtttatcacaacctggatgaaaacagccaaaaaatcctgagatccctggaaggttccgatgatgcagtcctgttacaaagacgtttggataacatgaacttcaagtggagtgaacttcggaaaaagtctctcaacattaggtcccatttggaagccagttctgaccagtggaagcgtctgcacctttctctgcaggaacttctggtgtggctacagctgaaagatgatgaattaagccggcaggcacctattggaggcgactttccagcagttcagaagcagaacgatgtacatagggccttcaagagggaattgaaaactaaagaacctgtaatcatgagtactcttgagactgtacgaatatttctgacagagcagcctttggaaggactagagaaactctaccaggagcccagagagctgcctcctgaggagagagcccagaatgtcactcggcttctacgaaagcaggctgaggaggtcaatactgagtgggaaaaattgaacctgcactccgctgactggcagagaaaaatagatgagacccttgaaagactccaggaacttcaagaggccacggatgagctggacctcaagctgcgccaagctgaggtgatcaagggatcctggcagcccgtgggcgatctcctcattgactctctccaagatcacctcgagaaagtcaaggcacttcgaggagaaattgcgcctctgaaagagaacgtgagccacgtcaatgaccttgctcgccagcttaccactttgggcattcagctctcaccgtataacctcagcactctggaagacctgaacaccagatggaagcttctgcaggtggccgtcgaggaccgagtcaggcagctgcatgaagcccacagggactttggtccagcatctcagcactttctttccacgtctgtccagggtccctgggagagagccatctcgccaaacaaagtgccctactatatcaaccacgagactcaaacaacttgctgggaccatcccaaaatgacagagctctaccagtctttagctgacctgaataatgtcagattctcagcttataggactgccatgaaactccgaagactgcagaaggccctttgcttggatctcttgagcctgtcagctgcatgtgatgccttggaccagcacaacctcaagcaaaatgaccagcccatggatatcctgcagattattaattgtttgaccactatttatgaccgcctggagcaagagcacaacaatttggtcaacgtccctctctgcgtggatatgtgtctgaactggctgctgaatgtttatgatacgggacgaacagggaggatccgtgtcctgtcttttaaaactggcatcatttccctgtgtaaagcacatttggaagacaagtacagataccttttcaagcaagtggcaagttcaacaggattttgtgaccagcgcaggctgggcctccttctgcatgattctatccaaattccaagacagttgggtgaagttgcatcctttgggggcagtaacattgagccaagtgtccggagctgcttccaatttgctaataataagccagagatcgaagcggccctcttcctagactggatgagactggaaccccagtccatggtgtggctgcccgtcctgcacagagtggctgctgcagaaactgccaagcatcaggccaaatgtaacatctgcaaagagtgtccaatcattggattcaggtacaggagtctaaagcactttaattatgacatctgccaaagctgctttttttctggtcgagttgcaaaaggccataaaatgcactatcccatggtggaatattgcactccgactacatcaggagaagatgttcgagactttgccaaggtactaaaaaacaaatttcgaaccaaaaggtattttgcgaagcatccccgaatgggctacctgccagtgcagactgtcttagagggggacaacatggaaactcccgttactctgatcaacttctggccagtagattctgcgcctgcctcgtcccctcagctttcacacgatgatactcattcacgcattgaacattatgctagcaggctagcagaaatggaaaacagcaatggatcttatctaaatgatagcatctctcctaatgagagcatagatgatgaacatttgttaatccagcattactgccaaagtttgaaccaggactcccccctgagccagcctcgtagtcctgcccagatcttgatttccttagagagtgaggaaagaggggagctagagagaatcctagcagatcttgaggaagaaaacaggaatctgcaagcagaatatgaccgtctaaagcagcagcacgaacataaaggcctgtccccactgccgtcccctcctgaaatgatgcccacctctccccagagtccccgggatgctgagctcattgctgaggccaagctactgcgtcaacacaaaggccgcctggaagccaggatgcaaatcctggaagaccacaataaacagctggagtcacagttacacaggctaaggcagctgctggagcaaccccaggcagaggccaaagtgaatggcacaacggtgtcctctccttctacctctctacagaggtccgacagcagtcagcctatgctgctccgagtggttggcagtcaaacttcggactccatgggtgaggaagatcttctcagtcctccccaggacacaagcacagggttagaggaggtgatggagcaactcaacaactccttccctagttcaagaggaagaaatacccctggaaagccaatgagagaggacacaatgtag

SEQ ID NO: 28 - protein, 1996 aa, Artificial Sequence
  TfRbp-truncated-dystrophin fusion protein amino acid sequence
MTHRPPMWSPVWPMLWWEEVEDCYEREDVQKKTFTKWVNAQFSKFGKQHIENLFSDLQDGRRLLDLLEGLTGQKLPKEKGSTRVHALNNVNKALRVLQNNNVDLVNIGSTDIVDGNHKLTLGLIWNIILHWQVKNVMKNIMAGLQQTNSEKILLSWVRQSTRNYPQVNVINFTTSWSDGLALNALIHSHRPDLFDWNSVVCQQSATQRLEHAFNIARYQLGIEKLLDPEDVDTTYPDKKSILMYITSLFQVLPQQVSIEAIQEVEMLPRPPKVTKEEHFQLHHQMHYSQQITVSLAQGYERTSSPKPRFKSYAYTQAAYVTTSDPTRSPFPSQHLEAPEDKSFGSSLMESEVNLDRYQTALEEVLSWLLSAEDTLQAQGEISNDVEVVKDQFHTHEGYMMDLTAHQGRVGNILQLGSKLIGTGKLSEDEETEVQEQMNLLNSRWECLRVASMEKQSNLHRVLMDLQNQKLKELNDWLTKTEERTRKMEEEPLGPDLEDLKRQVQQHKVLQEDLEQEQVRVNSLTHMVVVVDESSGDHATAALEEQLKVLGDRWANICRWTEDRWVLLQDILLKWQRLTEEQCLFSAWLSEKEDAVNKIHTTGFKDQNEMLSSLQKLAVLKADLEKKKQSMGKLYSLKQDLLSTLKNKSVTQKTEAWLDNFARCWDNLVQKLEKSTAQETEIAVQAKQPDVEEILSKGQHLYKEKPATQPVKRKLEDLSSEWKAVNRLLQELRAKQPDLAPGLTTIGASPTQTVTLVTQPVVTKETAISKLEMPSSLMLEVPALADFNRAWTELTDWLSLLDQVIKSQRVMVGDLEDINEMIIKQKATMQDLEQRRPQLEELITAAQNLKNKTSNQEARTIITDRIERIQNQWDEVQEHLQNRRQQLNEMLKDSTQWLEAKEEAEQVLGQARAKLESWKEGPYTVDAIQKKITETKQLAKDLRQWQTNVDVANDLALKLLRDYSADDTRKVHMITENINASWRSIHKRVSEREAALEETHRLLQQFPLDLEKFLAWLTEAETTANVLQDATRKERLLEDSKGVKELMKQWQDLQGEIEAHTDVYHNLDENSQKILRSLEGSDDAVLLQRRLDNMNFKWSELRKKSLNIRSHLEASSDQWKRLHLSLQELLVWLQLKDDELSRQAPIGGDFPAVQKQNDVHRAFKRELKTKEPVIMSTLETVRIFLTEQPLEGLEKLYQEPRELPPEERAQNVTRLLRKQAEEVNTEWEKLNLHSADWQRKIDETLERLQELQEATDELDLKLRQAEVIKGSWQPVGDLLIDSLQDHLEKVKALRGEIAPLKENVSHVNDLARQLTTLGIQLSPYNLSTLEDLNTRWKLLQVAVEDRVRQLHEAHRDFGPASQHFLSTSVQGPWERAISPNKVPYYINHETQTTCWDHPKMTELYQSLADLNNVRFSAYRTAMKLRRLQKALCLDLLSLSAACDALDQHNLKQNDQPMDILQIINCLTTIYDRLEQEHNNLVNVPLCVDMCLNWLLNVYDTGRTGRIRVLSFKTGIISLCKAHLEDKYRYLFKQVASSTGFCDQRRLGLLLHDSIQIPRQLGEVASFGGSNIEPSVRSCFQFANNKPEIEAALFLDWMRLEPQSMVWLPVLHRVAAAETAKHQAKCNICKECPIIGFRYRSLKHFNYDICQSCFFSGRVAKGHKMHYPMVEYCTPTTSGEDVRDFAKVLKNKFRTKRYFAKHPRMGYLPVQTVLEGDNMETPVTLINFWPVDSAPASSPQLSHDDTHSRIEHYASRLAEMENSNGSYLNDSISPNESIDDEHLLIQHYCQSLNQDSPLSQPRSPAQILISLESEERGELERILADLEEENRNLQAEYDRLKQQHEHKGLSPLPSPPEMMPTSPQSPRDAELIAEAKLLRQHKGRLEARMQILEDHNKQLESQLHRLRQLLEQPQAEAKVNGTTVSSPSTSLQRSDSSQPMLLRVVGSQTSDSMGEEDLLSPPQDTSTGLEEVMEQLNNSFPSSRGRNTPGKPMREDTM

SEQ ID NO: 29 - DNA, 5757 bp, Artificial Sequence
  Penetratin-dystrophin-utrophin fusion protein nucleotide sequence
  misc_feature (1)..(5757)
atgcgccagatcaagatctacttccagaaccgccgcatgaaatggaaaaaaatgctttggtgggaagaagtagaggactgttatgaaagagaagatgttcaaaagaaaacattcacaaaatgggtaaatgcacaattttctaagtttgggaagcagcatattgagaacctcttcagtgacctacaggatgggaggcgcctcctagacctcctcgaaggcctgacagggcaaaaactgccaaaagaaaaaggatccacaagagttcatgccctgaacaatgtcaacaaggcactgcgggttttgcagaacaataatgttgatttagtgaatattggaagtactgacatcgtagatggaaatcataaactgactcttggtttgatttggaatataatcctccactggcaggtcaaaaatgtaatgaaaaatatcatggctggattgcaacaaaccaacagtgaaaagattctcctgagctgggtccgacaatcaactcgtaattatccacaggttaatgtaatcaacttcaccaccagctggtctgatggcctggctttgaatgctctcatccatagtcataggccagacctatttgactggaatagtgtggtttgccagcagtcagccacacaacgactggaacatgcattcaacatcgccagatatcaattaggcatagagaaactactcgatcctgaagatgttgataccacctatccagataagaagtccatcttaatgtacatcacatcactcttccaagttttgcctcaacaagtgagcattgaagccatccaggaagtggaaatgttgccaaggccacctaaagtgactaaagaagaacattttcagttacatcatcaaatgcactattctcaacagatcacggtcagtctagcacagggatatgagagaacttcttcccctaagcctcgattcaagagctatgcctacacacaggctgcttatgtcaccacctctgaccctacacggagcccatttccttcacagcatttggaagctcctgaagacaagtcatttggcagttcattgatggagagtgaagtaaacctggaccgttatcaaacagctttagaagaagtattatcgtggcttctttctgctgaggacacattgcaagcacaaggagagatttctaatgatgtggaagtggtgaaagaccagtttcatactcatgaggggtacatgatggatttgacagcccatcagggccgggttggtaatattctacaattgggaagtaagctgattggaacaggaaaattatcagaagatgaagaaactgaagtacaagagcagatgaatctcctaaattcaagatgggaatgcctcagggtagctagcatggaaaaacaaagcaatttacatagagttttaatggatctccagaatcagaaactgaaagagttgaatgactggctaacaaaaacagaagaaagaacaaggaaaatggaggaagagcctcttggacctgatcttgaagacctaaaacgccaagtacaacaacataaggtgcttcaagaagatctagaacaagaacaagtcagggtcaattctctcactcacatggtggtggtagttgatgaatctagtggagatcacgcaactgctgctttggaagaacaacttaaggtattgggagatcgatgggcaaacatctgtagatggacagaagaccgctgggttcttttacaagacatccttctcaaatggcaacgtcttactgaagaacagtgcctttttagtgcatggctttcagaaaaagaagatgcagtgaacaagattcacacaactggctttaaagatcaaaatgaaatgttatcaagtcttcaaaaactggccgttttaaaagcggatctagaaaagaaaaagcaatccatgggcaaactgtattcactcaaacaagatcttctttcaacactgaagaataagtcagtgacccagaagacggaagcatggctggataactttgcccggtgttgggataatttagtccaaaaacttgaaaagagtacagcacagattgctgctcatcctaatgtccaaaaggtggtgctagtatcatctgcgtcagatattcctgttcagtctcatcgtacttcggaaatttcaattcctgctgatcttgataaaactataacagaactagccgactggctggtattaatcgaccagatgctgaagtccaacattgtcactgttggggatgtagaagagatcaataagaccgtttcccgaatgaaaattacaaaggctgacttagaacagcgccatcctcagctggattatgtttttacattggcacagaatttgaaaaataaagcttccagttcagatatgagaacagcaattacagaaaaattggaaagggtcaagaaccagtgggatggcacccagcatggcgttgagctaagacagcagcagcttgaggacatgattattgacagtcttcagtgggatgaccatagggaggagactgaagaactgatgagaaaatatgaggctcgactctatattcttcagcaagcccgacgggatccactcaccaaacaaatttctgataaccaaatactgcttcaagaactgggtcctggagatggtatcgtcatggcgttcgataacgtcctgcagaaactcctggaggaatatgggagtgatgacacaaggaatgtgaaagaaaccacagagtacttaaaaacatcatggatcaatctcaaacaaagtattgctgacagacagaacgccttggaggctgagtggaggacggtgcaggcctctcgcagagatctggaaaacttcctgaagtggatccaagaagcagagaccacagtgaatgtgcttgtggatgcctctcatcgggagaatgctcttcaggatagtatcttggccagggaactcaaacagcagatgcaggacatccaggcagaaattgatgcccacaatgacatatttaaaagcattgacggaaacaggcagaagatggtaaaagctttgggaaattctgaagaggctactatgcttcaacatcgactggatgatatgaaccaaagatggaatgacttaaaagcaaaatctgctagcatcagggcccatttggaggccagcgctgagaagtggaacaggttgctgatgtccttagaagaactgatcaaatggctgaatatgaaagatgaagagcttaagaaacaaatgcctattggaggagatgttccagccttacagctccagtatgaccattgtaaggccctgagacgggagttaaaggagaaagaatattctgtcctgaatgctgtcgaccaggcccgagttttcttggctgatcagccaattgaggcccctgaagagccaagaagaaacctacaatcaaaaacagaattaactcctgaggagagagcccaaaagattgccaaagccatgcgcaaacagtcttctgaagtcaaagaaaaatgggaaagtctaaatgctgtaactagcaattggcaaaagcaagtggacaaggcattggagaaactcagagacctgcagggagctatggatgacctggacgctgacatgaaggaggcagagtccgtgcggaatggctggaagcccgtgggagacttactcattgactcgctgcaggatcacattgaaaaaatcatggcatttagagaagaaattgcaccaatcaactttaaagttaaaacggtgaatgatttatccagtcagctgtctccacttgacctgcatccctctctaaagatgtctcgccagctagatgaccttaatatgcgatggaaacttttacaggtttctgtggatgatcgccttaaacagcttcaggaagcccacagagattttggaccatcctctcagcattttctctctacgtcagtccagctgccgtggcaaagatccatttcacataataaagtgccctattacatcaaccatcaaacacagaccacctgttgggaccatcctaaaatgaccgaactctttcaatcccttgctgacctgaataatgtacgtttttctgcctaccgtacagcaatcaaaatccgaagactacaaaaagcactatgtttggatctcttagagttgagtacaacaaatgaaattttcaaacagcacaagttgaaccaaaatgaccagctcctcagtgttccagatgtcatcaactgtctgacaacaacttatgatggacttgagcaaatgcataaggacctggtcaacgttccactctgtgttgatatgtgtctcaattggttgctcaatgtctatgacacgggtcgaactggaaaaattagagtgcagagtctgaagattggattaatgtctctctccaaaggtctcttggaagaaaaatacagatatctctttaaggaagttgcagggccaacagaaatgtgtgaccagaggcagctgggcctgttacttcatgatgccatccagatcccccggcagctaggtgaagtagcagcttttggaggcagtaatattgagcctagtgttcgcagctgcttccaacagaataacaataaaccagaaataagtgtgaaagagtttatagattggatgcatttggaaccacagtccatggtttggctcccagttttacatcgagtggcagcagcggagactgcaaaacatcaggccaaatgcaacatctgtaaagaatgtccaattgtcgggttcaggtatagaagccttaagcattttaactatgatgtctgccagagttgtttcttttcgggtcgaacagcaaaaggtcacaaattacattacccaatggtggaatattgtatacctacaacatctggggaagatgtacgagacttcacaaaggtacttaagaacaagttcaggtcgaagaagtactttgccaaacaccctcgacttggttacctgcctgtccagacagttcttgaaggtgacaacttagagactcctatcacactcatcagtatgtggccagagcactatgacccctcacaatctcctcaactgtttcatgatgacacccattcaagaatagaacaatatgccacacgactggcccagatggaaaggactaatgggtcttttctcactgatagcagctccaccacaggaagtgtggaagacgagcacgccctcatccagcagtattgccaaacactcggaggagagtccccagtgagccagccgcagagcccagctcagatcctgaagtcagtagagagggaagaacgtggagaactggagaggatcattgctgacctggaggaagaacaaagaaatctacaggtggagtatgagcagctgaaggaccagcacctccgaagggggctccctgtcggttcaccgccagagtcgattatatctccccatcacacgtctgaggattcagaacttatagcagaagcaaaactcctcaggcagcacaaaggtcggctggaggctaggatgcagattttagaagatcacaataaacagctggagtctcagctccaccgcctccgacagctgctggagcagcctgaatctgattcccgaatcaatggtgtttccccatgggcttctcctcagcattctgcactgagctactcgcttgatccagatgcctccggcccacagttccaccaggcagcgggagaggacctgctggccccaccgcacgacaccagcacggatctcacggaggtcatggagcagattcacagcacgtttccatcttgctgcccaaatgttcccagcaggccacaggcaatgtga

SEQ ID NO: 30 - protein, 1918 aa, Artificial Sequence
  Penetratin-dystrophin-utrophin fusion protein amino acid sequence
  MISC_FEATURE (1)..(1918)
MRQIKIYFQNRRMKWKKMLWWEEVEDCYEREDVQKKTFTKWVNAQFSKFGKQHIENLFSDLQDGRRLLDLLEGLTGQKLPKEKGSTRVHALNNVNKALRVLQNNNVDLVNIGSTDIVDGNHKLTLGLIWNIILHWQVKNVMKNIMAGLQQTNSEKILLSWVRQSTRNYPQVNVINFTTSWSDGLALNALIHSHRPDLFDWNSVVCQQSATQRLEHAFNIARYQLGIEKLLDPEDVDTTYPDKKSILMYITSLFQVLPQQVSIEAIQEVEMLPRPPKVTKEEHFQLHHQMHYSQQITVSLAQGYERTSSPKPRFKSYAYTQAAYVTTSDPTRSPFPSQHLEAPEDKSFGSSLMESEVNLDRYQTALEEVLSWLLSAEDTLQAQGEISNDVEVVKDQFHTHEGYMMDLTAHQGRVGNILQLGSKLIGTGKLSEDEETEVQEQMNLLNSRWECLRVASMEKQSNLHRVLMDLQNQKLKELNDWLTKTEERTRKMEEEPLGPDLEDLKRQVQQHKVLQEDLEQEQVRVNSLTHMVVVVDESSGDHATAALEEQLKVLGDRWANICRWTEDRWVLLQDILLKWQRLTEEQCLFSAWLSEKEDAVNKIHTTGFKDQNEMLSSLQKLAVLKADLEKKKQSMGKLYSLKQDLLSTLKNKSVTQKTEAWLDNFARCWDNLVQKLEKSTAQIAAHPNVQKVVLVSSASDIPVQSHRTSEISIPADLDKTITELADWLVLIDQMLKSNIVTVGDVEEINKTVSRMKITKADLEQRHPQLDYVFTLAQNLKNKASSSDMRTAITEKLERVKNQWDGTQHGVELRQQQLEDMIIDSLQWDDHREETEELMRKYEARLYILQQARRDPLTKQISDNQILLQELGPGDGIVMAFDNVLQKLLEEYGSDDTRNVKETTEYLKTSWINLKQSIADRQNALEAEWRTVQASRRDLENFLKWIQEAETTVNVLVDASHRENALQDSILARELKQQMQDIQAEIDAHNDIFKSIDGNRQKMVKALGNSEEATMLQHRLDDMNQRWNDLKAKSASIRAHLEASAEKWNRLLMSLEELIKWLNMKDEELKKQMPIGGDVPALQLQYDHCKALRRELKEKEYSVLNAVDQARVFLADQPIEAPEEPRRNLQSKTELTPEERAQKIAKAMRKQSSEVKEKWESLNAVTSNWQKQVDKALEKLRDLQGAMDDLDADMKEAESVRNGWKPVGDLLIDSLQDHIEKIMAFREEIAPINFKVKTVNDLSSQLSPLDLHPSLKMSRQLDDLNMRWKLLQVSVDDRLKQLQEAHRDFGPSSQHFLSTSVQLPWQRSISHNKVPYYINHQTQTTCWDHPKMTELFQSLADLNNVRFSAYRTAIKIRRLQKALCLDLLELSTTNEIFKQHKLNQNDQLLSVPDVINCLTTTYDGLEQMHKDLVNVPLCVDMCLNWLLNVYDTGRTGKIRVQSLKIGLMSLSKGLLEEKYRYLFKEVAGPTEMCDQRQLGLLLHDAIQIPRQLGEVAAFGGSNIEPSVRSCFQQNNNKPEISVKEFIDWMHLEPQSMVWLPVLHRVAAAETAKHQAKCNICKECPIVGFRYRSLKHFNYDVCQSCFFSGRTAKGHKLHYPMVEYCIPTTSGEDVRDFTKVLKNKFRSKKYFAKHPRLGYLPVQTVLEGDNLETPITLISMWPEHYDPSQSPQLFHDDTHSRIEQYATRLAQMERTNGSFLTDSSSTTGSVEDEHALIQQYCQTLGGESPVSQPQSPAQILKSVEREERGELERIIADLEEEQRNLQVEYEQLKDQHLRRGLPVGSPPESIISPHHTSEDSELIAEAKLLRQHKGRLEARMQILEDHNKQLESQLHRLRQLLEQPESDSRINGVSPWASPQHSALSYSLDPDASGPQFHQAAGEDLLAPPHDTSTDLTEVMEQIHSTFPSCCPNVPSRPQAM

SEQ ID NO: 31 - DNA, 5964 bp, Artificial Sequence
  Tat-dystrophin-utrophin chimeric protein nucleotide sequence
  misc_feature (1)..(5964)
atggagccagtagatcctagactagagccctggaagcaccctggaagtcagcctaaaactgcatgcaccaattgctattgtaaaaagtgttgctttcattgccaagtttgtttcataacaaaggccttaggcatctcctatggcaggaagaagcggagacagcgacgaagagctcctcaaggcagtcagactcatcaagtaagcttatcaaagcaacccacctcccaatcccgaggggacccgacaggcccgaaggaaatgctttggtgggaagaagtagaggactgttatgaaagagaagatgttcaaaagaaaacattcacaaaatgggtaaatgcacaattttctaagtttgggaagcagcatattgagaacctcttcagtgacctacaggatgggaggcgcctcctagacctcctcgaaggcctgacagggcaaaaactgccaaaagaaaaaggatccacaagagttcatgccctgaacaatgtcaacaaggcactgcgggttttgcagaacaataatgttgatttagtgaatattggaagtactgacatcgtagatggaaatcataaactgactcttggtttgatttggaatataatcctccactggcaggtcaaaaatgtaatgaaaaatatcatggctggattgcaacaaaccaacagtgaaaagattctcctgagctgggtccgacaatcaactcgtaattatccacaggttaatgtaatcaacttcaccaccagctggtctgatggcctggctttgaatgctctcatccatagtcataggccagacctatttgactggaatagtgtggtttgccagcagtcagccacacaacgactggaacatgcattcaacatcgccagatatcaattaggcatagagaaactactcgatcctgaagatgttgataccacctatccagataagaagtccatcttaatgtacatcacatcactcttccaagttttgcctcaacaagtgagcattgaagccatccaggaagtggaaatgttgccaaggccacctaaagtgactaaagaagaacattttcagttacatcatcaaatgcactattctcaacagatcacggtcagtctagcacagggatatgagagaacttcttcccctaagcctcgattcaagagctatgcctacacacaggctgcttatgtcaccacctctgaccctacacggagcccatttccttcacagcatttggaagctcctgaagacaagtcatttggcagttcattgatggagagtgaagtaaacctggaccgttatcaaacagctttagaagaagtattatcgtggcttctttctgctgaggacacattgcaagcacaaggagagatttctaatgatgtggaagtggtgaaagaccagtttcatactcatgaggggtacatgatggatttgacagcccatcagggccgggttggtaatattctacaattgggaagtaagctgattggaacaggaaaattatcagaagatgaagaaactgaagtacaagagcagatgaatctcctaaattcaagatgggaatgcctcagggtagctagcatggaaaaacaaagcaatttacatagagttttaatggatctccagaatcagaaactgaaagagttgaatgactggctaacaaaaacagaagaaagaacaaggaaaatggaggaagagcctcttggacctgatcttgaagacctaaaacgccaagtacaacaacataaggtgcttcaagaagatctagaacaagaacaagtcagggtcaattctctcactcacatggtggtggtagttgatgaatctagtggagatcacgcaactgctgctttggaagaacaacttaaggtattgggagatcgatgggcaaacatctgtagatggacagaagaccgctgggttcttttacaagacatccttctcaaatggcaacgtcttactgaagaacagtgcctttttagtgcatggctttcagaaaaagaagatgcagtgaacaagattcacacaactggctttaaagatcaaaatgaaatgttatcaagtcttcaaaaactggccgttttaaaagcggatctagaaaagaaaaagcaatccatgggcaaactgtattcactcaaacaagatcttctttcaacactgaagaataagtcagtgacccagaagacggaagcatggctggataactttgcccggtgttgggataatttagtccaaaaacttgaaaagagtacagcacagattgctgctcatcctaatgtccaaaaggtggtgctagtatcatctgcgtcagatattcctgttcagtctcatcgtacttcggaaatttcaattcctgctgatcttgataaaactataacagaactagccgactggctggtattaatcgaccagatgctgaagtccaacattgtcactgttggggatgtagaagagatcaataagaccgtttcccgaatgaaaattacaaaggctgacttagaacagcgccatcctcagctggattatgtttttacattggcacagaatttgaaaaataaagcttccagttcagatatgagaacagcaattacagaaaaattggaaagggtcaagaaccagtgggatggcacccagcatggcgttgagctaagacagcagcagcttgaggacatgattattgacagtcttcagtgggatgaccatagggaggagactgaagaactgatgagaaaatatgaggctcgactctatattcttcagcaagcccgacgggatccactcaccaaacaaatttctgataaccaaatactgcttcaagaactgggtcctggagatggtatcgtcatggcgttcgataacgtcctgcagaaactcctggaggaatatgggagtgatgacacaaggaatgtgaaagaaaccacagagtacttaaaaacatcatggatcaatctcaaacaaagtattgctgacagacagaacgccttggaggctgagtggaggacggtgcaggcctctcgcagagatctggaaaacttcctgaagtggatccaagaagcagagaccacagtgaatgtgcttgtggatgcctctcatcgggagaatgctcttcaggatagtatcttggccagggaactcaaacagcagatgcaggacatccaggcagaaattgatgcccacaatgacatatttaaaagcattgacggaaacaggcagaagatggtaaaagctttgggaaattctgaagaggctactatgcttcaacatcgactggatgatatgaaccaaagatggaatgacttaaaagcaaaatctgctagcatcagggcccatttggaggccagcgctgagaagtggaacaggttgctgatgtccttagaagaactgatcaaatggctgaatatgaaagatgaagagcttaagaaacaaatgcctattggaggagatgttccagccttacagctccagtatgaccattgtaaggccctgagacgggagttaaaggagaaagaatattctgtcctgaatgctgtcgaccaggcccgagttttcttggctgatcagccaattgaggcccctgaagagccaagaagaaacctacaatcaaaaacagaattaactcctgaggagagagcccaaaagattgccaaagccatgcgcaaacagtcttctgaagtcaaagaaaaatgggaaagtctaaatgctgtaactagcaattggcaaaagcaagtggacaaggcattggagaaactcagagacctgcagggagctatggatgacctggacgctgacatgaaggaggcagagtccgtgcggaatggctggaagcccgtgggagacttactcattgactcgctgcaggatcacattgaaaaaatcatggcatttagagaagaaattgcaccaatcaactttaaagttaaaacggtgaatgatttatccagtcagctgtctccacttgacctgcatccctctctaaagatgtctcgccagctagatgaccttaatatgcgatggaaacttttacaggtttctgtggatgatcgccttaaacagcttcaggaagcccacagagattttggaccatcctctcagcattttctctctacgtcagtccagctgccgtggcaaagatccatttcacataataaagtgccctattacatcaaccatcaaacacagaccacctgttgggaccatcctaaaatgaccgaactctttcaatcccttgctgacctgaataatgtacgtttttctgcctaccgtacagcaatcaaaatccgaagactacaaaaagcactatgtttggatctcttagagttgagtacaacaaatgaaattttcaaacagcacaagttgaaccaaaatgaccagctcctcagtgttccagatgtcatcaactgtctgacaacaacttatgatggacttgagcaaatgcataaggacctggtcaacgttccactctgtgttgatatgtgtctcaattggttgctcaatgtctatgacacgggtcgaactggaaaaattagagtgcagagtctgaagattggattaatgtctctctccaaaggtctcttggaagaaaaatacagatatctctttaaggaagttgcagggccaacagaaatgtgtgaccagaggcagctgggcctgttacttcatgatgccatccagatcccccggcagctaggtgaagtagcagcttttggaggcagtaatattgagcctagtgttcgcagctgcttccaacagaataacaataaaccagaaataagtgtgaaagagtttatagattggatgcatttggaaccacagtccatggtttggctcccagttttacatcgagtggcagcagcggagactgcaaaacatcaggccaaatgcaacatctgtaaagaatgtccaattgtcgggttcaggtatagaagccttaagcattttaactatgatgtctgccagagttgtttcttttcgggtcgaacagcaaaaggtcacaaattacattacccaatggtggaatattgtatacctacaacatctggggaagatgtacgagacttcacaaaggtacttaagaacaagttcaggtcgaagaagtactttgccaaacaccctcgacttggttacctgcctgtccagacagttcttgaaggtgacaacttagagactcctatcacactcatcagtatgtggccagagcactatgacccctcacaatctcctcaactgtttcatgatgacacccattcaagaatagaacaatatgccacacgactggcccagatggaaaggactaatgggtcttttctcactgatagcagctccaccacaggaagtgtggaagacgagcacgccctcatccagcagtattgccaaacactcggaggagagtccccagtgagccagccgcagagcccagctcagatcctgaagtcagtagagagggaagaacgtggagaactggagaggatcattgctgacctggaggaagaacaaagaaatctacaggtggagtatgagcagctgaaggaccagcacctccgaagggggctccctgtcggttcaccgccagagtcgattatatctccccatcacacgtctgaggattcagaacttatagcagaagcaaaactcctcaggcagcacaaaggtcggctggaggctaggatgcagattttagaagatcacaataaacagctggagtctcagctccaccgcctccgacagctgctggagcagcctgaatctgattcccgaatcaatggtgtttccccatgggcttctcctcagcattctgcactgagctactcgcttgatccagatgcctccggcccacagttccaccaggcagcgggagaggacctgctggccccaccgcacgacaccagcacggatctcacggaggtcatggagcagattcacagcacgtttccatcttgctgcccaaatgttcccagcaggccacaggcaatgtga

SEQ ID NO: 32 - protein, 1987 aa, Artificial Sequence
  Tat-dystrophin-utrophin chimeric protein amino acid sequence
  MISC_FEATURE (1)..(1987)
MEPVDPRLEPWKHPGSQPKTACTNCYCKKCCFHCQVCFITKALGISYGRKKRRQRRRAPQGSQTHQVSLSKQPTSQSRGDPTGPKEMLWWEEVEDCYEREDVQKKTFTKWVNAQFSKFGKQHIENLFSDLQDGRRLLDLLEGLTGQKLPKEKGSTRVHALNNVNKALRVLQNNNVDLVNIGSTDIVDGNHKLTLGLIWNIILHWQVKNVMKNIMAGLQQTNSEKILLSWVRQSTRNYPQVNVINFTTSWSDGLALNALIHSHRPDLFDWNSVVCQQSATQRLEHAFNIARYQLGIEKLLDPEDVDTTYPDKKSILMYITSLFQVLPQQVSIEAIQEVEMLPRPPKVTKEEHFQLHHQMHYSQQITVSLAQGYERTSSPKPRFKSYAYTQAAYVTTSDPTRSPFPSQHLEAPEDKSFGSSLMESEVNLDRYQTALEEVLSWLLSAEDTLQAQGEISNDVEVVKDQFHTHEGYMMDLTAHQGRVGNILQLGSKLIGTGKLSEDEETEVQEQMNLLNSRWECLRVASMEKQSNLHRVLMDLQNQKLKELNDWLTKTEERTRKMEEEPLGPDLEDLKRQVQQHKVLQEDLEQEQVRVNSLTHMVVVVDESSGDHATAALEEQLKVLGDRWANICRWTEDRWVLLQDILLKWQRLTEEQCLFSAWLSEKEDAVNKIHTTGFKDQNEMLSSLQKLAVLKADLEKKKQSMGKLYSLKQDLLSTLKNKSVTQKTEAWLDNFARCWDNLVQKLEKSTAQIAAHPNVQKVVLVSSASDIPVQSHRTSEISIPADLDKTITELADWLVLIDQMLKSNIVTVGDVEEINKTVSRMKITKADLEQRHPQLDYVFTLAQNLKNKASSSDMRTAITEKLERVKNQWDGTQHGVELRQQQLEDMIIDSLQWDDHREETEELMRKYEARLYILQQARRDPLTKQISDNQILLQELGPGDGIVMAFDNVLQKLLEEYGSDDTRNVKETTEYLKTSWINLKQSIADRQNALEAEWRTVQASRRDLENFLKWIQEAETTVNVLVDASHRENALQDSILARELKQQMQDIQAEIDAHNDIFKSIDGNRQKMVKALGNSEEATMLQHRLDDMNQRWNDLKAKSASIRAHLEASAEKWNRLLMSLEELIKWLNMKDEELKKQMPIGGDVPALQLQYDHCKALRRELKEKEYSVLNAVDQARVFLADQPIEAPEEPRRNLQSKTELTPEERAQKIAKAMRKQSSEVKEKWESLNAVTSNWQKQVDKALEKLRDLQGAMDDLDADMKEAESVRNGWKPVGDLLIDSLQDHIEKIMAFREEIAPINFKVKTVNDLSSQLSPLDLHPSLKMSRQLDDLNMRWKLLQVSVDDRLKQLQEAHRDFGPSSQHFLSTSVQLPWQRSISHNKVPYYINHQTQTTCWDHPKMTELFQSLADLNNVRFSAYRTAIKIRRLQKALCLDLLELSTTNEIFKQHKLNQNDQLLSVPDVINCLTTTYDGLEQMHKDLVNVPLCVDMCLNWLLNVYDTGRTGKIRVQSLKIGLMSLSKGLLEEKYRYLFKEVAGPTEMCDQRQLGLLLHDAIQIPRQLGEVAAFGGSNIEPSVRSCFQQNNNKPEISVKEFIDWMHLEPQSMVWLPVLHRVAAAETAKHQAKCNICKECPIVGFRYRSLKHFNYDVCQSCFFSGRTAKGHKLHYPMVEYCIPTTSGEDVRDFTKVLKNKFRSKKYFAKHPRLGYLPVQTVLEGDNLETPITLISMWPEHYDPSQSPQLFHDDTHSRIEQYATRLAQMERTNGSFLTDSSSTTGSVEDEHALIQQYCQTLGGESPVSQPQSPAQILKSVEREERGELERIIADLEEEQRNLQVEYEQLKDQHLRRGLPVGSPPESIISPHHTSEDSELIAEAKLLRQHKGRLEARMQILEDHNKQLESQLHRLRQLLEQPESDSRINGVSPWASPQHSALSYSLDPDASGPQFHQAAGEDLLAPPHDTSTDLTEVMEQIHSTFPSCCPNVPSRPQAM

SEQ ID NO: 33 - DNA, 5790 bp, Artificial Sequence
  Transportan-dystrophin-utrophin chimeric protein nucleotide sequence
  misc_feature (1)..(5790)
atgggttggactttaaattctgctggttatttattaggtaaaattaatttaaaagctttagctgccttggccaagaagatcttgatgctttggtgggaagaagtagaggactgttatgaaagagaagatgttcaaaagaaaacattcacaaaatgggtaaatgcacaattttctaagtttgggaagcagcatattgagaacctcttcagtgacctacaggatgggaggcgcctcctagacctcctcgaaggcctgacagggcaaaaactgccaaaagaaaaaggatccacaagagttcatgccctgaacaatgtcaacaaggcactgcgggttttgcagaacaataatgttgatttagtgaatattggaagtactgacatcgtagatggaaatcataaactgactcttggtttgatttggaatataatcctccactggcaggtcaaaaatgtaatgaaaaatatcatggctggattgcaacaaaccaacagtgaaaagattctcctgagctgggtccgacaatcaactcgtaattatccacaggttaatgtaatcaacttcaccaccagctggtctgatggcctggctttgaatgctctcatccatagtcataggccagacctatttgactggaatagtgtggtttgccagcagtcagccacacaacgactggaacatgcattcaacatcgccagatatcaattaggcatagagaaactactcgatcctgaagatgttgataccacctatccagataagaagtccatcttaatgtacatcacatcactcttccaagttttgcctcaacaagtgagcattgaagccatccaggaagtggaaatgttgccaaggccacctaaagtgactaaagaagaacattttcagttacatcatcaaatgcactattctcaacagatcacggtcagtctagcacagggatatgagagaacttcttcccctaagcctcgattcaagagctatgcctacacacaggctgcttatgtcaccacctctgaccctacacggagcccatttccttcacagcatttggaagctcctgaagacaagtcatttggcagttcattgatggagagtgaagtaaacctggaccgttatcaaacagctttagaagaagtattatcgtggcttctttctgctgaggacacattgcaagcacaaggagagatttctaatgatgtggaagtggtgaaagaccagtttcatactcatgaggggtacatgatggatttgacagcccatcagggccgggttggtaatattctacaattgggaagtaagctgattggaacaggaaaattatcagaagatgaagaaactgaagtacaagagcagatgaatctcctaaattcaagatgggaatgcctcagggtagctagcatggaaaaacaaagcaatttacatagagttttaatggatctccagaatcagaaactgaaagagttgaatgactggctaacaaaaacagaagaaagaacaaggaaaatggaggaagagcctcttggacctgatcttgaagacctaaaacgccaagtacaacaacataaggtgcttcaagaagatctagaacaagaacaagtcagggtcaattctctcactcacatggtggtggtagttgatgaatctagtggagatcacgcaactgctgctttggaagaacaacttaaggtattgggagatcgatgggcaaacatctgtagatggacagaagaccgctgggttcttttacaagacatccttctcaaatggcaacgtcttactgaagaacagtgcctttttagtgcatggctttcagaaaaagaagatgcagtgaacaagattcacacaactggctttaaagatcaaaatgaaatgttatcaagtcttcaaaaactggccgttttaaaagcggatctagaaaagaaaaagcaatccatgggcaaactgtattcactcaaacaagatcttctttcaacactgaagaataagtcagtgacccagaagacggaagcatggctggataactttgcccggtgttgggataatttagtccaaaaacttgaaaagagtacagcacagattgctgctcatcctaatgtccaaaaggtggtgctagtatcatctgcgtcagatattcctgttcagtctcatcgtacttcggaaatttcaattcctgctgatcttgataaaactataacagaactagccgactggctggtattaatcgaccagatgctgaagtccaacattgtcactgttggggatgtagaagagatcaataagaccgtttcccgaatgaaaattacaaaggctgacttagaacagcgccatcctcagctggattatgtttttacattggcacagaatttgaaaaataaagcttccagttcagatatgagaacagcaattacagaaaaattggaaagggtcaagaaccagtgggatggcacccagcatggcgttgagctaagacagcagcagcttgaggacatgattattgacagtcttcagtgggatgaccatagggaggagactgaagaactgatgagaaaatatgaggctcgactctatattcttcagcaagcccgacgggatccactcaccaaacaaatttctgataaccaaatactgcttcaagaactgggtcctggagatggtatcgtcatggcgttcgataacgtcctgcagaaactcctggaggaatatgggagtgatgacacaaggaatgtgaaagaaaccacagagtacttaaaaacatcatggatcaatctcaaacaaagtattgctgacagacagaacgccttggaggctgagtggaggacggtgcaggcctctcgcagagatctggaaaacttcctgaagtggatccaagaagcagagaccacagtgaatgtgcttgtggatgcctctcatcgggagaatgctcttcaggatagtatcttggccagggaactcaaacagcagatgcaggacatccaggcagaaattgatgcccacaatgacatatttaaaagcattgacggaaacaggcagaagatggtaaaagctttgggaaattctgaagaggctactatgcttcaacatcgactggatgatatgaaccaaagatggaatgacttaaaagcaaaatctgctagcatcagggcccatttggaggccagcgctgagaagtggaacaggttgctgatgtccttagaagaactgatcaaatggctgaatatgaaagatgaagagcttaagaaacaaatgcctattggaggagatgttccagccttacagctccagtatgaccattgtaaggccctgagacgggagttaaaggagaaagaatattctgtcctgaatgctgtcgaccaggcccgagttttcttggctgatcagccaattgaggcccctgaagagccaagaagaaacctacaatcaaaaacagaattaactcctgaggagagagcccaaaagattgccaaagccatgcgcaaacagtcttctgaagtcaaagaaaaatgggaaagtctaaatgctgtaactagcaattggcaaaagcaagtggacaaggcattggagaaactcagagacctgcagggagctatggatgacctggacgctgacatgaaggaggcagagtccgtgcggaatggctggaagcccgtgggagacttactcattgactcgctgcaggatcacattgaaaaaatcatggcatttagagaagaaattgcaccaatcaactttaaagttaaaacggtgaatgatttatccagtcagctgtctccacttgacctgcatccctctctaaagatgtctcgccagctagatgaccttaatatgcgatggaaacttttacaggtttctgtggatgatcgccttaaacagcttcaggaagcccacagagattttggaccatcctctcagcattttctctctacgtcagtccagctgccgtggcaaagatccatttcacataataaagtgccctattacatcaaccatcaaacacagaccacctgttgggaccatcctaaaatgaccgaactctttcaatcccttgctgacctgaataatgtacgtttttctgcctaccgtacagcaatcaaaatccgaagactacaaaaagcactatgtttggatctcttagagttgagtacaacaaatgaaattttcaaacagcacaagttgaaccaaaatgaccagctcctcagtgttccagatgtcatcaactgtctgacaacaacttatgatggacttgagcaaatgcataaggacctggtcaacgttccactctgtgttgatatgtgtctcaattggttgctcaatgtctatgacacgggtcgaactggaaaaattagagtgcagagtctgaagattggattaatgtctctctccaaaggtctcttggaagaaaaatacagatatctctttaaggaagttgcagggccaacagaaatgtgtgaccagaggcagctgggcctgttacttcatgatgccatccagatcccccggcagctaggtgaagtagcagcttttggaggcagtaatattgagcctagtgttcgcagctgcttccaacagaataacaataaaccagaaataagtgtgaaagagtttatagattggatgcatttggaaccacagtccatggtttggctcccagttttacatcgagtggcagcagcggagactgcaaaacatcaggccaaatgcaacatctgtaaagaatgtccaattgtcgggttcaggtatagaagccttaagcattttaactatgatgtctgccagagttgtttcttttcgggtcgaacagcaaaaggtcacaaattacattacccaatggtggaatattgtatacctacaacatctggggaagatgtacgagacttcacaaaggtacttaagaacaagttcaggtcgaagaagtactttgccaaacaccctcgacttggttacctgcctgtccagacagttcttgaaggtgacaacttagagactcctatcacactcatcagtatgtggccagagcactatgacccctcacaatctcctcaactgtttcatgatgacacccattcaagaatagaacaatatgccacacgactggcccagatggaaaggactaatgggtcttttctcactgatagcagctccaccacaggaagtgtggaagacgagcacgccctcatccagcagtattgccaaacactcggaggagagtccccagtgagccagccgcagagcccagctcagatcctgaagtcagtagagagggaagaacgtggagaactggagaggatcattgctgacctggaggaagaacaaagaaatctacaggtggagtatgagcagctgaaggaccagcacctccgaagggggctccctgtcggttcaccgccagagtcgattatatctccccatcacacgtctgaggattcagaacttatagcagaagcaaaactcctcaggcagcacaaaggtcggctggaggctaggatgcagattttagaagatcacaataaacagctggagtctcagctccaccgcctccgacagctgctggagcagcctgaatctgattcccgaatcaatggtgtttccccatgggcttctcctcagcattctgcactgagctactcgcttgatccagatgcctccggcccacagttccaccaggcagcgggagaggacctgctggccccaccgcacgacaccagcacggatctcacggaggtcatggagcagattcacagcacgtttccatcttgctgcccaaatgttcccagcaggccacaggcaatgtga

SEQ ID NO: 34 - protein, 1929 aa, Artificial Sequence
  Transportan-dystrophin-utrophin chimeric protein amino acid sequence
  MISC_FEATURE (1)..(1929)
MGWTLNSAGYLLGKINLKALAALAKKILMLWWEEVEDCYEREDVQKKTFTKWVNAQFSKFGKQHIENLFSDLQDGRRLLDLLEGLTGQKLPKEKGSTRVHALNNVNKALRVLQNNNVDLVNIGSTDIVDGNHKLTLGLIWNIILHWQVKNVMKNIMAGLQQTNSEKILLSWVRQSTRNYPQVNVINFTTSWSDGLALNALIHSHRPDLFDWNSVVCQQSATQRLEHAFNIARYQLGIEKLLDPEDVDTTYPDKKSILMYITSLFQVLPQQVSIEAIQEVEMLPRPPKVTKEEHFQLHHQMHYSQQITVSLAQGYERTSSPKPRFKSYAYTQAAYVTTSDPTRSPFPSQHLEAPEDKSFGSSLMESEVNLDRYQTALEEVLSWLLSAEDTLQAQGEISNDVEVVKDQFHTHEGYMMDLTAHQGRVGNILQLGSKLIGTGKLSEDEETEVQEQMNLLNSRWECLRVASMEKQSNLHRVLMDLQNQKLKELNDWLTKTEERTRKMEEEPLGPDLEDLKRQVQQHKVLQEDLEQEQVRVNSLTHMVVVVDESSGDHATAALEEQLKVLGDRWANICRWTEDRWVLLQDILLKWQRLTEEQCLFSAWLSEKEDAVNKIHTTGFKDQNEMLSSLQKLAVLKADLEKKKQSMGKLYSLKQDLLSTLKNKSVTQKTEAWLDNFARCWDNLVQKLEKSTAQIAAHPNVQKVVLVSSASDIPVQSHRTSEISIPADLDKTITELADWLVLIDQMLKSNIVTVGDVEEINKTVSRMKITKADLEQRHPQLDYVFTLAQNLKNKASSSDMRTAITEKLERVKNQWDGTQHGVELRQQQLEDMIIDSLQWDDHREETEELMRKYEARLYILQQARRDPLTKQISDNQILLQELGPGDGIVMAFDNVLQKLLEEYGSDDTRNVKETTEYLKTSWINLKQSIADRQNALEAEWRTVQASRRDLENFLKWIQEAETTVNVLVDASHRENALQDSILARELKQQMQDIQAEIDAHNDIFKSIDGNRQKMVKALGNSEEATMLQHRLDDMNQRWNDLKAKSASIRAHLEASAEKWNRLLMSLEELIKWLNMKDEELKKQMPIGGDVPALQLQYDHCKALRRELKEKEYSVLNAVDQARVFLADQPIEAPEEPRRNLQSKTELTPEERAQKIAKAMRKQSSEVKEKWESLNAVTSNWQKQVDKALEKLRDLQGAMDDLDADMKEAESVRNGWKPVGDLLIDSLQDHIEKIMAFREEIAPINFKVKTVNDLSSQLSPLDLHPSLKMSRQLDDLNMRWKLLQVSVDDRLKQLQEAHRDFGPSSQHFLSTSVQLPWQRSISHNKVPYYINHQTQTTCWDHPKMTELFQSLADLNNVRFSAYRTAIKIRRLQKALCLDLLELSTTNEIFKQHKLNQNDQLLSVPDVINCLTTTYDGLEQMHKDLVNVPLCVDMCLNWLLNVYDTGRTGKIRVQSLKIGLMSLSKGLLEEKYRYLFKEVAGPTEMCDQRQLGLLLHDAIQIPRQLGEVAAFGGSNIEPSVRSCFQQNNNKPEISVKEFIDWMHLEPQSMVWLPVLHRVAAAETAKHQAKCNICKECPIVGFRYRSLKHFNYDVCQSCFFSGRTAKGHKLHYPMVEYCIPTTSGEDVRDFTKVLKNKFRSKKYFAKHPRLGYLPVQTVLEGDNLETPITLISMWPEHYDPSQSPQLFHDDTHSRIEQYATRLAQMERTNGSFLTDSSSTTGSVEDEHALIQQYCQTLGGESPVSQPQSPAQILKSVEREERGELERIIADLEEEQRNLQVEYEQLKDQHLRRGLPVGSPPESIISPHHTSEDSELIAEAKLLRQHKGRLEARMQILEDHNKQLESQLHRLRQLLEQPESDSRINGVSPWASPQHSALSYSLDPDASGPQFHQAAGEDLLAPPHDTSTDLTEVMEQIHSTFPSCCPNVPSRPQAM

SEQ ID NO: 35 - DNA, 5745 bp, Artificial Sequence
  TfRbp-dystrophin-utrophin chimeric protein nucleotide sequence
  misc_feature (1)..(5745)
atgactcatcgtcctcctatgtggtctcctgtttggcctatgctttggtgggaagaagtagaggactgttatgaaagagaagatgttcaaaagaaaacattcacaaaatgggtaaatgcacaattttctaagtttgggaagcagcatattgagaacctcttcagtgacctacaggatgggaggcgcctcctagacctcctcgaaggcctgacagggcaaaaactgccaaaagaaaaaggatccacaagagttcatgccctgaacaatgtcaacaaggcactgcgggttttgcagaacaataatgttgatttagtgaatattggaagtactgacatcgtagatggaaatcataaactgactcttggtttgatttggaatataatcctccactggcaggtcaaaaatgtaatgaaaaatatcatggctggattgcaacaaaccaacagtgaaaagattctcctgagctgggtccgacaatcaactcgtaattatccacaggttaatgtaatcaacttcaccaccagctggtctgatggcctggctttgaatgctctcatccatagtcataggccagacctatttgactggaatagtgtggtttgccagcagtcagccacacaacgactggaacatgcattcaacatcgccagatatcaattaggcatagagaaactactcgatcctgaagatgttgataccacctatccagataagaagtccatcttaatgtacatcacatcactcttccaagttttgcctcaacaagtgagcattgaagccatccaggaagtggaaatgttgccaaggccacctaaagtgactaaagaagaacattttcagttacatcatcaaatgcactattctcaacagatcacggtcagtctagcacagggatatgagagaacttcttcccctaagcctcgattcaagagctatgcctacacacaggctgcttatgtcaccacctctgaccctacacggagcccatttccttcacagcatttggaagctcctgaagacaagtcatttggcagttcattgatggagagtgaagtaaacctggaccgttatcaaacagctttagaagaagtattatcgtggcttctttctgctgaggacacattgcaagcacaaggagagatttctaatgatgtggaagtggtgaaagaccagtttcatactcatgaggggtacatgatggatttgacagcccatcagggccgggttggtaatattctacaattgggaagtaagctgattggaacaggaaaattatcagaagatgaagaaactgaagtacaagagcagatgaatctcctaaattcaagatgggaatgcctcagggtagctagcatggaaaaacaaagcaatttacatagagttttaatggatctccagaatcagaaactgaaagagttgaatgactggctaacaaaaacagaagaaagaacaaggaaaatggaggaagagcctcttggacctgatcttgaagacctaaaacgccaagtacaacaacataaggtgcttcaagaagatctagaacaagaacaagtcagggtcaattctctcactcacatggtggtggtagttgatgaatctagtggagatcacgcaactgctgctttggaagaacaacttaaggtattgggagatcgatgggcaaacatctgtagatggacagaagaccgctgggttcttttacaagacatccttctcaaatggcaacgtcttactgaagaacagtgcctttttagtgcatggctttcagaaaaagaagatgcagtgaacaagattcacacaactggctttaaagatcaaaatgaaatgttatcaagtcttcaaaaactggccgttttaaaagcggatctagaaaagaaaaagcaatccatgggcaaactgtattcactcaaacaagatcttctttcaacactgaagaataagtcagtgacccagaagacggaagcatggctggataactttgcccggtgttgggataatttagtccaaaaacttgaaaagagtacagcacagattgctgctcatcctaatgtccaaaaggtggtgctagtatcatctgcgtcagatattcctgttcagtctcatcgtacttcggaaatttcaattcctgctgatcttgataaaactataacagaactagccgactggctggtattaatcgaccagatgctgaagtccaacattgtcactgttggggatgtagaagagatcaataagaccgtttcccgaatgaaaattacaaaggctgacttagaacagcgccatcctcagctggattatgtttttacattggcacagaatttgaaaaataaagcttccagttcagatatgagaacagcaattacagaaaaattggaaagggtcaagaaccagtgggatggcacccagcatggcgttgagctaagacagcagcagcttgaggacatgattattgacagtcttcagtgggatgaccatagggaggagactgaagaactgatgagaaaatatgaggctcgactctatattcttcagcaagcccgacgggatccactcaccaaacaaatttctgataaccaaatactgcttcaagaactgggtcctggagatggtatcgtcatggcgttcgataacgtcctgcagaaactcctggaggaatatgggagtgatgacacaaggaatgtgaaagaaaccacagagtacttaaaaacatcatggatcaatctcaaacaaagtattgctgacagacagaacgccttggaggctgagtggaggacggtgcaggcctctcgcagagatctggaaaacttcctgaagtggatccaagaagcagagaccacagtgaatgtgcttgtggatgcctctcatcgggagaatgctcttcaggatagtatcttggccagggaactcaaacagcagatgcaggacatccaggcagaaattgatgcccacaatgacatatttaaaagcattgacggaaacaggcagaagatggtaaaagctttgggaaattctgaagaggctactatgcttcaacatcgactggatgatatgaaccaaagatggaatgacttaaaagcaaaatctgctagcatcagggcccatttggaggccagcgctgagaagtggaacaggttgctgatgtccttagaagaactgatcaaatggctgaatatgaaagatgaagagcttaagaaacaaatgcctattggaggagatgttccagccttacagctccagtatgaccattgtaaggccctgagacgggagttaaaggagaaagaatattctgtcctgaatgctgtcgaccaggcccgagttttcttggctgatcagccaattgaggcccctgaagagccaagaagaaacctacaatcaaaaacagaattaactcctgaggagagagcccaaaagattgccaaagccatgcgcaaacagtcttctgaagtcaaagaaaaatgggaaagtctaaatgctgtaactagcaattggcaaaagcaagtggacaaggcattggagaaactcagagacctgcagggagctatggatgacctggacgctgacatgaaggaggcagagtccgtgcggaatggctggaagcccgtgggagacttactcattgactcgctgcaggatcacattgaaaaaatcatggcatttagagaagaaattgcaccaatcaactttaaagttaaaacggtgaatgatttatccagtcagctgtctccacttgacctgcatccctctctaaagatgtctcgccagctagatgaccttaatatgcgatggaaacttttacaggtttctgtggatgatcgccttaaacagcttcaggaagcccacagagattttggaccatcctctcagcattttctctctacgtcagtccagctgccgtggcaaagatccatttcacataataaagtgccctattacatcaaccatcaaacacagaccacctgttgggaccatcctaaaatgaccgaactctttcaatcccttgctgacctgaataatgtacgtttttctgcctaccgtacagcaatcaaaatccgaagactacaaaaagcactatgtttggatctcttagagttgagtacaacaaatgaaattttcaaacagcacaagttgaaccaaaatgaccagctcctcagtgttccagatgtcatcaactgtctgacaacaacttatgatggacttgagcaaatgcataaggacctggtcaacgttccactctgtgttgatatgtgtctcaattggttgctcaatgtctatgacacgggtcgaactggaaaaattagagtgcagagtctgaagattggattaatgtctctctccaaaggtctcttggaagaaaaatacagatatctctttaaggaagttgcagggccaacagaaatgtgtgaccagaggcagctgggcctgttacttcatgatgccatccagatcccccggcagctaggtgaagtagcagcttttggaggcagtaatattgagcctagtgttcgcagctgcttccaacagaataacaataaaccagaaataagtgtgaaagagtttatagattggatgcatttggaaccacagtccatggtttggctcccagttttacatcgagtggcagcagcggagactgcaaaacatcaggccaaatgcaacatctgtaaagaatgtccaattgtcgggttcaggtatagaagccttaagcattttaactatgatgtctgccagagttgtttcttttcgggtcgaacagcaaaaggtcacaaattacattacccaatggtggaatattgtatacctacaacatctggggaagatgtacgagacttcacaaaggtacttaagaacaagttcaggtcgaagaagtactttgccaaacaccctcgacttggttacctgcctgtccagacagttcttgaaggtgacaacttagagactcctatcacactcatcagtatgtggccagagcactatgacccctcacaatctcctcaactgtttcatgatgacacccattcaagaatagaacaatatgccacacgactggcccagatggaaaggactaatgggtcttttctcactgatagcagctccaccacaggaagtgtggaagacgagcacgccctcatccagcagtattgccaaacactcggaggagagtccccagtgagccagccgcagagcccagctcagatcctgaagtcagtagagagggaagaacgtggagaactggagaggatcattgctgacctggaggaagaacaaagaaatctacaggtggagtatgagcagctgaaggaccagcacctccgaagggggctccctgtcggttcaccgccagagtcgattatatctccccatcacacgtctgaggattcagaacttatagcagaagcaaaactcctcaggcagcacaaaggtcggctggaggctaggatgcagattttagaagatcacaataaacagctggagtctcagctccaccgcctccgacagctgctggagcagcctgaatctgattcccgaatcaatggtgtttccccatgggcttctcctcagcattctgcactgagctactcgcttgatccagatgcctccggcccacagttccaccaggcagcgggagaggacctgctggccccaccgcacgacaccagcacggatctcacggaggtcatggagcagattcacagcacgtttccatcttgctgcccaaatgttcccagcaggccacaggcaatgtga

SEQ ID NO: 36 - protein, 1914 aa, Artificial Sequence
  TfRbp-dystrophin-utrophin chimeric protein amino acid sequence
  MISC_FEATURE (1)..(1914)
MTHRPPMWSPVWPMLWWEEVEDCYEREDVQKKTFTKWVNAQFSKFGKQHIENLFSDLQDGRRLLDLLEGLTGQKLPKEKGSTRVHALNNVNKALRVLQNNNVDLVNIGSTDIVDGNHKLTLGLIWNIILHWQVKNVMKNIMAGLQQTNSEKILLSWVRQSTRNYPQVNVINFTTSWSDGLALNALIHSHRPDLFDWNSVVCQQSATQRLEHAFNIARYQLGIEKLLDPEDVDTTYPDKKSILMYITSLFQVLPQQVSIEAIQEVEMLPRPPKVTKEEHFQLHHQMHYSQQITVSLAQGYERTSSPKPRFKSYAYTQAAYVTTSDPTRSPFPSQHLEAPEDKSFGSSLMESEVNLDRYQTALEEVLSWLLSAEDTLQAQGEISNDVEVVKDQFHTHEGYMMDLTAHQGRVGNILQLGSKLIGTGKLSEDEETEVQEQMNLLNSRWECLRVASMEKQSNLHRVLMDLQNQKLKELNDWLTKTEERTRKMEEEPLGPDLEDLKRQVQQHKVLQEDLEQEQVRVNSLTHMVVVVDESSGDHATAALEEQLKVLGDRWANICRWTEDRWVLLQDILLKWQRLTEEQCLFSAWLSEKEDAVNKIHTTGFKDQNEMLSSLQKLAVLKADLEKKKQSMGKLYSLKQDLLSTLKNKSVTQKTEAWLDNFARCWDNLVQKLEKSTAQIAAHPNVQKVVLVSSASDIPVQSHRTSEISIPADLDKTITELADWLVLIDQMLKSNIVTVGDVEEINKTVSRMKITKADLEQRHPQLDYVFTLAQNLKNKASSSDMRTAITEKLERVKNQWDGTQHGVELRQQQLEDMIIDSLQWDDHREETEELMRKYEARLYILQQARRDPLTKQISDNQILLQELGPGDGIVMAFDNVLQKLLEEYGSDDTRNVKETTEYLKTSWINLKQSIADRQNALEAEWRTVQASRRDLENFLKWIQEAETTVNVLVDASHRENALQDSILARELKQQMQDIQAEIDAHNDIFKSIDGNRQKMVKALGNSEEATMLQHRLDDMNQRWNDLKAKSASIRAHLEASAEKWNRLLMSLEELIKWLNMKDEELKKQMPIGGDVPALQLQYDHCKALRRELKEKEYSVLNAVDQARVFLADQPIEAPEEPRRNLQSKTELTPEERAQKIAKAMRKQSSEVKEKWESLNAVTSNWQKQVDKALEKLRDLQGAMDDLDADMKEAESVRNGWKPVGDLLIDSLQDHIEKIMAFREEIAPINFKVKTVNDLSSQLSPLDLHPSLKMSRQLDDLNMRWKLLQVSVDDRLKQLQEAHRDFGPSSQHFLSTSVQLPWQRSISHNKVPYYINHQTQTTCWDHPKMTELFQSLADLNNVRFSAYRTAIKIRRLQKALCLDLLELSTTNEIFKQHKLNQNDQLLSVPDVINCLTTTYDGLEQMHKDLVNVPLCVDMCLNWLLNVYDTGRTGKIRVQSLKIGLMSLSKGLLEEKYRYLFKEVAGPTEMCDQRQLGLLLHDAIQIPRQLGEVAAFGGSNIEPSVRSCFQQNNNKPEISVKEFIDWMHLEPQSMVWLPVLHRVAAAETAKHQAKCNICKECPIVGFRYRSLKHFNYDVCQSCFFSGRTAKGHKLHYPMVEYCIPTTSGEDVRDFTKVLKNKFRSKKYFAKHPRLGYLPVQTVLEGDNLETPITLISMWPEHYDPSQSPQLFHDDTHSRIEQYATRLAQMERTNGSFLTDSSSTTGSVEDEHALIQQYCQTLGGESPVSQPQSPAQILKSVEREERGELERIIADLEEEQRNLQVEYEQLKDQHLRRGLPVGSPPESIISPHHTSEDSELIAEAKLLRQHKGRLEARMQILEDHNKQLESQLHRLRQLLEQPESDSRINGVSPWASPQHSALSYSLDPDASGPQFHQAAGEDLLAPPHDTSTDLTEVMEQIHSTFPSCCPNVPSRPQAM

SEQ ID NO: 37 - DNA, 5706 bp, Artificial Sequence
  Dystrophin-utrophin chimeric protein nucleotide sequence
  misc_feature (1)..(5706)
atgctttggtgggaagaagtagaggactgttatgaaagagaagatgttcaaaagaaaacattcacaaaatgggtaaatgcacaattttctaagtttgggaagcagcatattgagaacctcttcagtgacctacaggatgggaggcgcctcctagacctcctcgaaggcctgacagggcaaaaactgccaaaagaaaaaggatccacaagagttcatgccctgaacaatgtcaacaaggcactgcgggttttgcagaacaataatgttgatttagtgaatattggaagtactgacatcgtagatggaaatcataaactgactcttggtttgatttggaatataatcctccactggcaggtcaaaaatgtaatgaaaaatatcatggctggattgcaacaaaccaacagtgaaaagattctcctgagctgggtccgacaatcaactcgtaattatccacaggttaatgtaatcaacttcaccaccagctggtctgatggcctggctttgaatgctctcatccatagtcataggccagacctatttgactggaatagtgtggtttgccagcagtcagccacacaacgactggaacatgcattcaacatcgccagatatcaattaggcatagagaaactactcgatcctgaagatgttgataccacctatccagataagaagtccatcttaatgtacatcacatcactcttccaagttttgcctcaacaagtgagcattgaagccatccaggaagtggaaatgttgccaaggccacctaaagtgactaaagaagaacattttcagttacatcatcaaatgcactattctcaacagatcacggtcagtctagcacagggatatgagagaacttcttcccctaagcctcgattcaagagctatgcctacacacaggctgcttatgtcaccacctctgaccctacacggagcccatttccttcacagcatttggaagctcctgaagacaagtcatttggcagttcattgatggagagtgaagtaaacctggaccgttatcaaacagctttagaagaagtattatcgtggcttctttctgctgaggacacattgcaagcacaaggagagatttctaatgatgtggaagtggtgaaagaccagtttcatactcatgaggggtacatgatggatttgacagcccatcagggccgggttggtaatattctacaattgggaagtaagctgattggaacaggaaaattatcagaagatgaagaaactgaagtacaagagcagatgaatctcctaaattcaagatgggaatgcctcagggtagctagcatggaaaaacaaagcaatttacatagagttttaatggatctccagaatcagaaactgaaagagttgaatgactggctaacaaaaacagaagaaagaacaaggaaaatggaggaagagcctcttggacctgatcttgaagacctaaaacgccaagtacaacaacataaggtgcttcaagaagatctagaacaagaacaagtcagggtcaattctctcactcacatggtggtggtagttgatgaatctagtggagatcacgcaactgctgctttggaagaacaacttaaggtattgggagatcgatgggcaaacatctgtagatggacagaagaccgctgggttcttttacaagacatccttctcaaatggcaacgtcttactgaagaacagtgcctttttagtgcatggctttcagaaaaagaagatgcagtgaacaagattcacacaactggctttaaagatcaaaatgaaatgttatcaagtcttcaaaaactggccgttttaaaagcggatctagaaaagaaaaagcaatccatgggcaaactgtattcactcaaacaagatcttctttcaacactgaagaataagtcagtgacccagaagacggaagcatggctggataactttgcccggtgttgggataatttagtccaaaaacttgaaaagagtacagcacagattgctgctcatcctaatgtccaaaaggtggtgctagtatcatctgcgtcagatattcctgttcagtctcatcgtacttcggaaatttcaattcctgctgatcttgataaaactataacagaactagccgactggctggtattaatcgaccagatgctgaagtccaacattgtcactgttggggatgtagaagagatcaataagaccgtttcccgaatgaaaattacaaaggctgacttagaacagcgccatcctcagctggattatgtttttacattggcacagaatttgaaaaataaagcttccagttcagatatgagaacagcaattacagaaaaattggaaagggtcaagaaccagtgggatggcacccagcatggcgttgagctaagacagcagcagcttgaggacatgattattgacagtcttcagtgggatgaccatagggaggagactgaagaactgatgagaaaatatgaggctcgactctatattcttcagcaagcccgacgggatccactcaccaaacaaatttctgataaccaaatactgcttcaagaactgggtcctggagatggtatcgtcatggcgttcgataacgtcctgcagaaactcctggaggaatatgggagtgatgacacaaggaatgtgaaagaaaccacagagtacttaaaaacatcatggatcaatctcaaacaaagtattgctgacagacagaacgccttggaggctgagtggaggacggtgcaggcctctcgcagagatctggaaaacttcctgaagtggatccaagaagcagagaccacagtgaatgtgcttgtggatgcctctcatcgggagaatgctcttcaggatagtatcttggccagggaactcaaacagcagatgcaggacatccaggcagaaattgatgcccacaatgacatatttaaaagcattgacggaaacaggcagaagatggtaaaagctttgggaaattctgaagaggctactatgcttcaacatcgactggatgatatgaaccaaagatggaatgacttaaaagcaaaatctgctagcatcagggcccatttggaggccagcgctgagaagtggaacaggttgctgatgtccttagaagaactgatcaaatggctgaatatgaaagatgaagagcttaagaaacaaatgcctattggaggagatgttccagccttacagctccagtatgaccattgtaaggccctgagacgggagttaaaggagaaagaatattctgtcctgaatgctgtcgaccaggcccgagttttcttggctgatcagccaattgaggcccctgaagagccaagaagaaacctacaatcaaaaacagaattaactcctgaggagagagcccaaaagattgccaaagccatgcgcaaacagtcttctgaagtcaaagaaaaatgggaaagtctaaatgctgtaactagcaattggcaaaagcaagtggacaaggcattggagaaactcagagacctgcagggagctatggatgacctggacgctgacatgaaggaggcagagtccgtgcggaatggctggaagcccgtgggagacttactcattgactcgctgcaggatcacattgaaaaaatcatggcatttagagaagaaattgcaccaatcaactttaaagttaaaacggtgaatgatttatccagtcagctgtctccacttgacctgcatccctctctaaagatgtctcgccagctagatgaccttaatatgcgatggaaacttttacaggtttctgtggatgatcgccttaaacagcttcaggaagcccacagagattttggaccatcctctcagcattttctctctacgtcagtccagctgccgtggcaaagatccatttcacataataaagtgccctattacatcaaccatcaaacacagaccacctgttgggaccatcctaaaatgaccgaactctttcaatcccttgctgacctgaataatgtacgtttttctgcctaccgtacagcaatcaaaatccgaagactacaaaaagcactatgtttggatctcttagagttgagtacaacaaatgaaattttcaaacagcacaagttgaaccaaaatgaccagctcctcagtgttccagatgtcatcaactgtctgacaacaacttatgatggacttgagcaaatgcataaggacctggtcaacgttccactctgtgttgatatgtgtctcaattggttgctcaatgtctatgacacgggtcgaactggaaaaattagagtgcagagtctgaagattggattaatgtctctctccaaaggtctcttggaagaaaaatacagatatctctttaaggaagttgcagggccaacagaaatgtgtgaccagaggcagctgggcctgttacttcatgatgccatccagatcccccggcagctaggtgaagtagcagcttttggaggcagtaatattgagcctagtgttcgcagctgcttccaacagaataacaataaaccagaaataagtgtgaaagagtttatagattggatgcatttggaaccacagtccatggtttggctcccagttttacatcgagtggcagcagcggagactgcaaaacatcaggccaaatgcaacatctgtaaagaatgtccaattgtcgggttcaggtatagaagccttaagcattttaactatgatgtctgccagagttgtttcttttcgggtcgaacagcaaaaggtcacaaattacattacccaatggtggaatattgtatacctacaacatctggggaagatgtacgagacttcacaaaggtacttaagaacaagttcaggtcgaagaagtactttgccaaacaccctcgacttggttacctgcctgtccagacagttcttgaaggtgacaacttagagactcctatcacactcatcagtatgtggccagagcactatgacccctcacaatctcctcaactgtttcatgatgacacccattcaagaatagaacaatatgccacacgactggcccagatggaaaggactaatgggtcttttctcactgatagcagctccaccacaggaagtgtggaagacgagcacgccctcatccagcagtattgccaaacactcggaggagagtccccagtgagccagccgcagagcccagctcagatcctgaagtcagtagagagggaagaacgtggagaactggagaggatcattgctgacctggaggaagaacaaagaaatctacaggtggagtatgagcagctgaaggaccagcacctccgaagggggctccctgtcggttcaccgccagagtcgattatatctccccatcacacgtctgaggattcagaacttatagcagaagcaaaactcctcaggcagcacaaaggtcggctggaggctaggatgcagattttagaagatcacaataaacagctggagtctcagctccaccgcctccgacagctgctggagcagcctgaatctgattcccgaatcaatggtgtttccccatgggcttctcctcagcattctgcactgagctactcgcttgatccagatgcctccggcccacagttccaccaggcagcgggagaggacctgctggccccaccgcacgacaccagcacggatctcacggaggtcatggagcagattcacagcacgtttccatcttgctgcccaaatgttcccagcaggccacaggcaatgtga

SEQ ID NO: 38 - protein, 1901 aa, Artificial Sequence
  Dystrophin-utrophin chimeric protein amino acid sequence
  MISC_FEATURE (1)..(1901)
MLWWEEVEDCYEREDVQKKTFTKWVNAQFSKFGKQHIENLFSDLQDGRRLLDLLEGLTGQKLPKEKGSTRVHALNNVNKALRVLQNNNVDLVNIGSTDIVDGNHKLTLGLIWNIILHWQVKNVMKNIMAGLQQTNSEKILLSWVRQSTRNYPQVNVINFTTSWSDGLALNALIHSHRPDLFDWNSVVCQQSATQRLEHAFNIARYQLGIEKLLDPEDVDTTYPDKKSILMYITSLFQVLPQQVSIEAIQEVEMLPRPPKVTKEEHFQLHHQMHYSQQITVSLAQGYERTSSPKPRFKSYAYTQAAYVTTSDPTRSPFPSQHLEAPEDKSFGSSLMESEVNLDRYQTALEEVLSWLLSAEDTLQAQGEISNDVEVVKDQFHTHEGYMMDLTAHQGRVGNILQLGSKLIGTGKLSEDEETEVQEQMNLLNSRWECLRVASMEKQSNLHRVLMDLQNQKLKELNDWLTKTEERTRKMEEEPLGPDLEDLKRQVQQHKVLQEDLEQEQVRVNSLTHMVVVVDESSGDHATAALEEQLKVLGDRWANICRWTEDRWVLLQDILLKWQRLTEEQCLFSAWLSEKEDAVNKIHTTGFKDQNEMLSSLQKLAVLKADLEKKKQSMGKLYSLKQDLLSTLKNKSVTQKTEAWLDNFARCWDNLVQKLEKSTAQIAAHPNVQKVVLVSSASDIPVQSHRTSEISIPADLDKTITELADWLVLIDQMLKSNIVTVGDVEEINKTVSRMKITKADLEQRHPQLDYVFTLAQNLKNKASSSDMRTAITEKLERVKNQWDGTQHGVELRQQQLEDMIIDSLQWDDHREETEELMRKYEARLYILQQARRDPLTKQISDNQILLQELGPGDGIVMAFDNVLQKLLEEYGSDDTRNVKETTEYLKTSWINLKQSIADRQNALEAEWRTVQASRRDLENFLKWIQEAETTVNVLVDASHRENALQDSILARELKQQMQDIQAEIDAHNDIFKSIDGNRQKMVKALGNSEEATMLQHRLDDMNQRWNDLKAKSASIRAHLEASAEKWNRLLMSLEELIKWLNMKDEELKKQMPIGGDVPALQLQYDHCKALRRELKEKEYSVLNAVDQARVFLADQPIEAPEEPRRNLQSKTELTPEERAQKIAKAMRKQSSEVKEKWESLNAVTSNWQKQVDKALEKLRDLQGAMDDLDADMKEAESVRNGWKPVGDLLIDSLQDHIEKIMAFREEIAPINFKVKTVNDLSSQLSPLDLHPSLKMSRQLDDLNMRWKLLQVSVDDRLKQLQEAHRDFGPSSQHFLSTSVQLPWQRSISHNKVPYYINHQTQTTCWDHPKMTELFQSLADLNNVRFSAYRTAIKIRRLQKALCLDLLELSTTNEIFKQHKLNQNDQLLSVPDVINCLTTTYDGLEQMHKDLVNVPLCVDMCLNWLLNVYDTGRTGKIRVQSLKIGLMSLSKGLLEEKYRYLFKEVAGPTEMCDQRQLGLLLHDAIQIPRQLGEVAAFGGSNIEPSVRSCFQQNNNKPEISVKEFIDWMHLEPQSMVWLPVLHRVAAAETAKHQAKCNICKECPIVGFRYRSLKHFNYDVCQSCFFSGRTAKGHKLHYPMVEYCIPTTSGEDVRDFTKVLKNKFRSKKYFAKHPRLGYLPVQTVLEGDNLETPITLISMWPEHYDPSQSPQLFHDDTHSRIEQYATRLAQMERTNGSFLTDSSSTTGSVEDEHALIQQYCQTLGGESPVSQPQSPAQILKSVEREERGELERIIADLEEEQRNLQVEYEQLKDQHLRRGLPVGSPPESIISPHHTSEDSELIAEAKLLRQHKGRLEARMQILEDHNKQLESQLHRLRQLLEQPESDSRINGVSPWASPQHSALSYSLDPDASGPQFHQAAGEDLLAPPHDTSTDLTEVMEQIHSTFPSCCPNVPSRPQAM

SEQ ID NO: 39 - DNA, 7239 bp, Artificial Sequence
  VSV-G-dystrophin-utrophin chimeric protein nucleotide sequence
  misc_feature (1)..(7239)
atgaagtgccttttgtacttagcttttttattcatcggggtgaattgcaagttcaccatagtttttccacacaaccaaaaaggaaactggaaaaatgttccttccaattaccattattgcccgtcaagctcagatttaaattggcataatgacttaataggcacagccttacaagtcaaaatgcccaagagtcacaaggctattcaagcagacggttggatgtgtcatgcttccaaatgggtcactacttgtgatttccgctggtacggaccgaagtatataacacattccatccgatccttcactccatctgtagaacaatgcaaggaaagcattgaacaaacgaaacaaggaacttggctgaatccaggcttccctcctcaaagttgtggatatgcaactgtgacggatgctgaagcagcgattgtccaggtgactcctcaccatgtgcttgttgatgaatacacaggagaatgggttgattcacagttcatcaacggaaaatgcagcaatgacatatgccccactgtccataactccacaacctggcattccgactataaggtcaaagggctatgtgattctaacctcatttccacggacatcaccttcttctcagaggacggagagctatcatccctaggaaaggagggcacagggttcagaagtaactactttgcttatgaaactggagacaaggcctgcaaaatgcagtactgcaagcattggggagtcagactcccatcaggtgtctggttcgagatggctgataaggatctctttgctgcagccagattccctgaatgcccagaagggtcaagtatctctgctccatctcagacctcagtggatgtaagtctcattcaggacgttgagaggatcttggattattccctctgccaagaaacctggagcaaaatcagagcgggtcttcccatctctccagtggatctcagctatcttgctcctaaaaacccaggaaccggtcctgtctttaccataatcaatggtaccctaaaatactttgagaccagatacatcagagtcgatattgctgctccaatcctctcaagaatggtcggaatgatcagtggaactaccacagaaagggaactgtgggatgactgggctccatatgaagacgtggaaattggacccaatggagttctgaggaccagtttaggatataagtttcctttatatatgattggacatggtatgttggactccgatcttcatcttagctcaaaggctcaggtgtttgaacatcctcacattcaagacgctgcttcgcagcttcctgatgatgagactttattttttggtgatactgggctatccaaaaatccaatcgagtttgtagaaggttggttcagtagttggaagagctctattgcctcttttttctttatcatagggttaatcattggactattcttggttctccgagttggtatttatctttgcattaaattaaagcacaccaagaaaagacagatttatacagacatagagatgaaccgacttggaaagatgctttggtgggaagaagtagaggactgttatgaaagagaagatgttcaaaagaaaacattcacaaaatgggtaaatgcacaattttctaagtttgggaagcagcatattgagaacctcttcagtgacctacaggatgggaggcgcctcctagacctcctcgaaggcctgacagggcaaaaactgccaaaagaaaaaggatccacaagagttcatgccctgaacaatgtcaacaaggcactgcgggttttgcagaacaataatgttgatttagtgaatattggaagtactgacatcgtagatggaaatcataaactgactcttggtttgatttggaatataatcctccactggcaggtcaaaaatgtaatgaaaaatatcatggctggattgcaacaaaccaacagtgaaaagattctcctgagctgggtccgacaatcaactcgtaattatccacaggttaatgtaatcaacttcaccaccagctggtctgatggcctggctttgaatgctctcatccatagtcataggccagacctatttgactggaatagtgtggtttgccagcagtcagccacacaacgactggaacatgcattcaacatcgccagatatcaattaggcatagagaaactactcgatcctgaagatgttgataccacctatccagataagaagtccatcttaatgtacatcacatcactcttccaagttttgcctcaacaagtgagcattgaagccatccaggaagtggaaatgttgccaaggccacctaaagtgactaaagaagaacattttcagttacatcatcaaatgcactattctcaacagatcacggtcagtctagcacagggatatgagagaacttcttcccctaagcctcgattcaagagctatgcctacacacaggctgcttatgtcaccacctctgaccctacacggagcccatttccttcacagcatttggaagctcctgaagacaagtcatttggcagttcattgatggagagtgaagtaaacctggaccgttatcaaacagctttagaagaagtattatcgtggcttctttctgctgaggacacattgcaagcacaaggagagatttctaatgatgtggaagtggtgaaagaccagtttcatactcatgaggggtacatgatggatttgacagcccatcagggccgggttggtaatattctacaattgggaagtaagctgattggaacaggaaaattatcagaagatgaagaaactgaagtacaagagcagatgaatctcctaaattcaagatgggaatgcctcagggtagctagcatggaaaaacaaagcaatttacatagagttttaatggatctccagaatcagaaactgaaagagttgaatgactggctaacaaaaacagaagaaagaacaaggaaaatggaggaagagcctcttggacctgatcttgaagacctaaaacgccaagtacaacaacataaggtgcttcaagaagatctagaacaagaacaagtcagggtcaattctctcactcacatggtggtggtagttgatgaatctagtggagatcacgcaactgctgctttggaagaacaacttaaggtattgggagatcgatgggcaaacatctgtagatggacagaagaccgctgggttcttttacaagacatccttctcaaatggcaacgtcttactgaagaacagtgcctttttagtgcatggctttcagaaaaagaagatgcagtgaacaagattcacacaactggctttaaagatcaaaatgaaatgttatcaagtcttcaaaaactggccgttttaaaagcggatctagaaaagaaaaagcaatccatgggcaaactgtattcactcaaacaagatcttctttcaacactgaagaataagtcagtgacccagaagacggaagcatggctggataactttgcccggtgttgggataatttagtccaaaaacttgaaaagagtacagcacagattgctgctcatcctaatgtccaaaaggtggtgctagtatcatctgcgtcagatattcctgttcagtctcatcgtacttcggaaatttcaattcctgctgatcttgataaaactataacagaactagccgactggctggtattaatcgaccagatgctgaagtccaacattgtcactgttggggatgtagaagagatcaataagaccgtttcccgaatgaaaattacaaaggctgacttagaacagcgccatcctcagctggattatgtttttacattggcacagaatttgaaaaataaagcttccagttcagatatgagaacagcaattacagaaaaattggaaagggtcaagaaccagtgggatggcacccagcatggcgttgagctaagacagcagcagcttgaggacatgattattgacagtcttcagtgggatgaccatagggaggagactgaagaactgatgagaaaatatgaggctcgactctatattcttcagcaagcccgacgggatccactcaccaaacaaatttctgataaccaaatactgcttcaagaactgggtcctggagatggtatcgtcatggcgttcgataacgtcctgcagaaactcctggaggaatatgggagtgatgacacaaggaatgtgaaagaaaccacagagtacttaaaaacatcatggatcaatctcaaacaaagtattgctgacagacagaacgccttggaggctgagtggaggacggtgcaggcctctcgcagagatctggaaaacttcctgaagtggatccaagaagcagagaccacagtgaatgtgcttgtggatgcctctcatcgggagaatgctcttcaggatagtatcttggccagggaactcaaacagcagatgcaggacatccaggcagaaattgatgcccacaatgacatatttaaaagcattgacggaaacaggcagaagatggtaaaagctttgggaaattctgaagaggctactatgcttcaacatcgactggatgatatgaaccaaagatggaatgacttaaaagcaaaatctgctagcatcagggcccatttggaggccagcgctgagaagtggaacaggttgctgatgtccttagaagaactgatcaaatggctgaatatgaaagatgaagagcttaagaaacaaatgcctattggaggagatgttccagccttacagctccagtatgaccattgtaaggccctgagacgggagttaaaggagaaagaatattctgtcctgaatgctgtcgaccaggcccgagttttcttggctgatcagccaattgaggcccctgaagagccaagaagaaacctacaatcaaaaacagaattaactcctgaggagagagcccaaaagattgccaaagccatgcgcaaacagtcttctgaagtcaaagaaaaatgggaaagtctaaatgctgtaactagcaattggcaaaagcaagtggacaaggcattggagaaactcagagacctgcagggagctatggatgacctggacgctgacatgaaggaggcagagtccgtgcggaatggctggaagcccgtgggagacttactcattgactcgctgcaggatcacattgaaaaaatcatggcatttagagaagaaattgcaccaatcaactttaaagttaaaacggtgaatgatttatccagtcagctgtctccacttgacctgcatccctctctaaagatgtctcgccagctagatgaccttaatatgcgatggaaacttttacaggtttctgtggatgatcgccttaaacagcttcaggaagcccacagagattttggaccatcctctcagcattttctctctacgtcagtccagctgccgtggcaaagatccatttcacataataaagtgccctattacatcaaccatcaaacacagaccacctgttgggaccatcctaaaatgaccgaactctttcaatcccttgctgacctgaataatgtacgtttttctgcctaccgtacagcaatcaaaatccgaagactacaaaaagcactatgtttggatctcttagagttgagtacaacaaatgaaattttcaaacagcacaagttgaaccaaaatgaccagctcctcagtgttccagatgtcatcaactgtctgacaacaacttatgatggacttgagcaaatgcataaggacctggtcaacgttccactctgtgttgatatgtgtctcaattggttgctcaatgtctatgacacgggtcgaactggaaaaattagagtgcagagtctgaagattggattaatgtctctctccaaaggtctcttggaagaaaaatacagatatctctttaaggaagttgcagggccaacagaaatgtgtgaccagaggcagctgggcctgttacttcatgatgccatccagatcccccggcagctaggtgaagtagcagcttttggaggcagtaatattgagcctagtgttcgcagctgcttccaacagaataacaataaaccagaaataagtgtgaaagagtttatagattggatgcatttggaaccacagtccatggtttggctcccagttttacatcgagtggcagcagcggagactgcaaaacatcaggccaaatgcaacatctgtaaagaatgtccaattgtcgggttcaggtatagaagccttaagcattttaactatgatgtctgccagagttgtttcttttcgggtcgaacagcaaaaggtcacaaattacattacccaatggtggaatattgtatacctacaacatctggggaagatgtacgagacttcacaaaggtacttaagaacaagttcaggtcgaagaagtactttgccaaacaccctcgacttggttacctgcctgtccagacagttcttgaaggtgacaacttagagactcctatcacactcatcagtatgtggccagagcactatgacccctcacaatctcctcaactgtttcatgatgacacccattcaagaatagaacaatatgccacacgactggcccagatggaaaggactaatgggtcttttctcactgatagcagctccaccacaggaagtgtggaagacgagcacgccctcatccagcagtattgccaaacactcggaggagagtccccagtgagccagccgcagagcccagctcagatcctgaagtcagtagagagggaagaacgtggagaactggagaggatcattgctgacctggaggaagaacaaagaaatctacaggtggagtatgagcagctgaaggaccagcacctccgaagggggctccctgtcggttcaccgccagagtcgattatatctccccatcacacgtctgaggattcagaacttatagcagaagcaaaactcctcaggcagcacaaaggtcggctggaggctaggatgcagattttagaagatcacaataaacagctggagtctcagctccaccgcctccgacagctgctggagcagcctgaatctgattcccgaatcaatggtgtttccccatgggcttctcctcagcattctgcactgagctactcgcttgatccagatgcctccggcccacagttccaccaggcagcgggagaggacctgctggccccaccgcacgacaccagcacggatctcacggaggtcatggagcagattcacagcacgtttccatcttgctgcccaaatgttcccagcaggccacaggcaatgtga

SEQ ID NO: 40 - DNA, 7239 bp, Artificial Sequence
  Dystrophin-utrophin-VSV-G chimeric protein nucleotide sequence
  misc_feature (1)..(7239)
atgctttggtgggaagaagtagaggactgttatgaaagagaagatgttcaaaagaaaacattcacaaaatgggtaaatgcacaattttctaagtttgggaagcagcatattgagaacctcttcagtgacctacaggatgggaggcgcctcctagacctcctcgaaggcctgacagggcaaaaactgccaaaagaaaaaggatccacaagagttcatgccctgaacaatgtcaacaaggcactgcgggttttgcagaacaataatgttgatttagtgaatattggaagtactgacatcgtagatggaaatcataaactgactcttggtttgatttggaatataatcctccactggcaggtcaaaaatgtaatgaaaaatatcatggctggattgcaacaaaccaacagtgaaaagattctcctgagctgggtccgacaatcaactcgtaattatccacaggttaatgtaatcaacttcaccaccagctggtctgatggcctggctttgaatgctctcatccatagtcataggccagacctatttgactggaatagtgtggtttgccagcagtcagccacacaacgactggaacatgcattcaacatcgccagatatcaattaggcatagagaaactactcgatcctgaagatgttgataccacctatccagataagaagtccatcttaatgtacatcacatcactcttccaagttttgcctcaacaagtgagcattgaagccatccaggaagtggaaatgttgccaaggccacctaaagtgactaaagaagaacattttcagttacatcatcaaatgcactattctcaacagatcacggtcagtctagcacagggatatgagagaacttcttcccctaagcctcgattcaagagctatgcctacacacaggctgcttatgtcaccacctctgaccctacacggagcccatttccttcacagcatttggaagctcctgaagacaagtcatttggcagttcattgatggagagtgaagtaaacctggaccgttatcaaacagctttagaagaagtattatcgtggcttctttctgctgaggacacattgcaagcacaaggagagatttctaatgatgtggaagtggtgaaagaccagtttcatactcatgaggggtacatgatggatttgacagcccatcagggccgggttggtaatattctacaattgggaagtaagctgattggaacaggaaaattatcagaagatgaagaaactgaagtacaagagcagatgaatctcctaaattcaagatgggaatgcctcagggtagctagcatggaaaaacaaagcaatttacatagagttttaatggatctccagaatcagaaactgaaagagttgaatgactggctaacaaaaacagaagaaagaacaaggaaaatggaggaagagcctcttggacctgatcttgaagacctaaaacgccaagtacaacaacataaggtgcttcaagaagatctagaacaagaacaagtcagggtcaattctctcactcacatggtggtggtagttgatgaatctagtggagatcacgcaactgctgctttggaagaacaacttaaggtattgggagatcgatgggcaaacatctgtagatggacagaagaccgctgggttcttttacaagacatccttctcaaatggcaacgtcttactgaagaacagtgcctttttagtgcatggctttcagaaaaagaagatgcagtgaacaagattcacacaactggctttaaagatcaaaatgaaatgttatcaagtcttcaaaaactggccgttttaaaagcggatctagaaaagaaaaagcaatccatgggcaaactgtattcactcaaacaagatcttctttcaacactgaagaataagtcagtgacccagaagacggaagcatggctggataactttgcccggtgttgggataatttagtccaaaaacttgaaaagagtacagcacagattgctgctcatcctaatgtccaaaaggtggtgctagtatcatctgcgtcagatattcctgttcagtctcatcgtacttcggaaatttcaattcctgctgatcttgataaaactataacagaactagccgactggctggtattaatcgaccagatgctgaagtccaacattgtcactgttggggatgtagaagagatcaataagaccgtttcccgaatgaaaattacaaaggctgacttagaacagcgccatcctcagctggattatgtttttacattggcacagaatttgaaaaataaagcttccagttcagatatgagaacagcaattacagaaaaattggaaagggtcaagaaccagtgggatggcacccagcatggcgttgagctaagacagcagcagcttgaggacatgattattgacagtcttcagtgggatgaccatagggaggagactgaagaactgatgagaaaatatgaggctcgactctatattcttcagcaagcccgacgggatccactcaccaaacaaatttctgataaccaaatactgcttcaagaactgggtcctggagatggtatcgtcatggcgttcgataacgtcctgcagaaactcctggaggaatatgggagtgatgacacaaggaatgtgaaagaaaccacagagtacttaaaaacatcatggatcaatctcaaacaaagtattgctgacagacagaacgccttggaggctgagtggaggacggtgcaggcctctcgcagagatctggaaaacttcctgaagtggatccaagaagcagagaccacagtgaatgtgcttgtggatgcctctcatcgggagaatgctcttcaggatagtatcttggccagggaactcaaacagcagatgcaggacatccaggcagaaattgatgcccacaatgacatatttaaaagcattgacggaaacaggcagaagatggtaaaagctttgggaaattctgaagaggctactatgcttcaacatcgactggatgatatgaaccaaagatggaatgacttaaaagcaaaatctgctagcatcagggcccatttggaggccagcgctgagaagtggaacaggttgctgatgtccttagaagaactgatcaaatggctgaatatgaaagatgaagagcttaagaaacaaatgcctattggaggagatgttccagccttacagctccagtatgaccattgtaaggccctgagacgggagttaaaggagaaagaatattctgtcctgaatgctgtcgaccaggcccgagttttcttggctgatcagccaattgaggcccctgaagagccaagaagaaacctacaatcaaaaacagaattaactcctgaggagagagcccaaaagattgccaaagccatgcgcaaacagtcttctgaagtcaaagaaaaatgggaaagtctaaatgctgtaactagcaattggcaaaagcaagtggacaaggcattggagaaactcagagacctgcagggagctatggatgacctggacgctgacatgaaggaggcagagtccgtgcggaatggctggaagcccgtgggagacttactcattgactcgctgcaggatcacattgaaaaaatcatggcatttagagaagaaattgcaccaatcaactttaaagttaaaacggtgaatgatttatccagtcagctgtctccacttgacctgcatccctctctaaagatgtctcgccagctagatgaccttaatatgcgatggaaacttttacaggtttctgtggatgatcgccttaaacagcttcaggaagcccacagagattttggaccatcctctcagcattttctctctacgtcagtccagctgccgtggcaaagatccatttcacataataaagtgccctattacatcaaccatcaaacacagaccacctgttgggaccatcctaaaatgaccgaactctttcaatcccttgctgacctgaataatgtacgtttttctgcctaccgtacagcaatcaaaatccgaagactacaaaaagcactatgtttggatctcttagagttgagtacaacaaatgaaattttcaaacagcacaagttgaaccaaaatgaccagctcctcagtgttccagatgtcatcaactgtctgacaacaacttatgatggacttgagcaaatgcataaggacctggtcaacgttccactctgtgttgatatgtgtctcaattggttgctcaatgtctatgacacgggtcgaactggaaaaattagagtgcagagtctgaagattggattaatgtctctctccaaaggtctcttggaagaaaaatacagatatctctttaaggaagttgcagggccaacagaaatgtgtgaccagaggcagctgggcctgttacttcatgatgccatccagatcccccggcagctaggtgaagtagcagcttttggaggcagtaatattgagcctagtgttcgcagctgcttccaacagaataacaataaaccagaaataagtgtgaaagagtttatagattggatgcatttggaaccacagtccatggtttggctcccagttttacatcgagtggcagcagcggagactgcaaaacatcaggccaaatgcaacatctgtaaagaatgtccaattgtcgggttcaggtatagaagccttaagcattttaactatgatgtctgccagagttgtttcttttcgggtcgaacagcaaaaggtcacaaattacattacccaatggtggaatattgtatacctacaacatctggggaagatgtacgagacttcacaaaggtacttaagaacaagttcaggtcgaagaagtactttgccaaacaccctcgacttggttacctgcctgtccagacagttcttgaaggtgacaacttagagactcctatcacactcatcagtatgtggccagagcactatgacccctcacaatctcctcaactgtttcatgatgacacccattcaagaatagaacaatatgccacacgactggcccagatggaaaggactaatgggtcttttctcactgatagcagctccaccacaggaagtgtggaagacgagcacgccctcatccagcagtattgccaaacactcggaggagagtccccagtgagccagccgcagagcccagctcagatcctgaagtcagtagagagggaagaacgtggagaactggagaggatcattgctgacctggaggaagaacaaagaaatctacaggtggagtatgagcagctgaaggaccagcacctccgaagggggctccctgtcggttcaccgccagagtcgattatatctccccatcacacgtctgaggattcagaacttatagcagaagcaaaactcctcaggcagcacaaaggtcggctggaggctaggatgcagattttagaagatcacaataaacagctggagtctcagctccaccgcctccgacagctgctggagcagcctgaatctgattcccgaatcaatggtgtttccccatgggcttctcctcagcattctgcactgagctactcgcttgatccagatgcctccggcccacagttccaccaggcagcgggagaggacctgctggccccaccgcacgacaccagcacggatctcacggaggtcatggagcagattcacagcacgtttccatcttgctgcccaaatgttcccagcaggccacaggcaatgatgaagtgccttttgtacttagcttttttattcatcggggtgaattgcaagttcaccatagtttttccacacaaccaaaaaggaaactggaaaaatgttccttccaattaccattattgcccgtcaagctcagatttaaattggcataatgacttaataggcacagccttacaagtcaaaatgcccaagagtcacaaggctattcaagcagacggttggatgtgtcatgcttccaaatgggtcactacttgtgatttccgctggtacggaccgaagtatataacacattccatccgatccttcactccatctgtagaacaatgcaaggaaagcattgaacaaacgaaacaaggaacttggctgaatccaggcttccctcctcaaagttgtggatatgcaactgtgacggatgctgaagcagcgattgtccaggtgactcctcaccatgtgcttgttgatgaatacacaggagaatgggttgattcacagttcatcaacggaaaatgcagcaatgacatatgccccactgtccataactccacaacctggcattccgactataaggtcaaagggctatgtgattctaacctcatttccacggacatcaccttcttctcagaggacggagagctatcatccctaggaaaggagggcacagggttcagaagtaactactttgcttatgaaactggagacaaggcctgcaaaatgcagtactgcaagcattggggagtcagactcccatcaggtgtctggttcgagatggctgataaggatctctttgctgcagccagattccctgaatgcccagaagggtcaagtatctctgctccatctcagacctcagtggatgtaagtctcattcaggacgttgagaggatcttggattattccctctgccaagaaacctggagcaaaatcagagcgggtcttcccatctctccagtggatctcagctatcttgctcctaaaaacccaggaaccggtcctgtctttaccataatcaatggtaccctaaaatactttgagaccagatacatcagagtcgatattgctgctccaatcctctcaagaatggtcggaatgatcagtggaactaccacagaaagggaactgtgggatgactgggctccatatgaagacgtggaaattggacccaatggagttctgaggaccagtttaggatataagtttcctttatatatgattggacatggtatgttggactccgatcttcatcttagctcaaaggctcaggtgtttgaacatcctcacattcaagacgctgcttcgcagcttcctgatgatgagactttattttttggtgatactgggctatccaaaaatccaatcgagtttgtagaaggttggttcagtagttggaagagctctattgcctcttttttctttatcatagggttaatcattggactattcttggttctccgagttggtatttatctttgcattaaattaaagcacaccaagaaaagacagatttatacagacatagagatgaaccgacttggaaagtaa

SEQ ID NO: 41 - protein, 2412 aa, Artificial Sequence
  Dystrophin-utrophin-VSV-G chimeric protein amino acid sequence
  MISC_FEATURE (1)..(2412)
MLWWEEVEDCYEREDVQKKTFTKWVNAQFSKFGKQHIENLFSDLQDGRRLLDLLEGLTGQKLPKEKGSTRVHALNNVNKALRVLQNNNVDLVNIGSTDIVDGNHKLTLGLIWNIILHWQVKNVMKNIMAGLQQTNSEKILLSWVRQSTRNYPQVNVINFTTSWSDGLALNALIHSHRPDLFDWNSVVCQQSATQRLEHAFNIARYQLGIEKLLDPEDVDTTYPDKKSILMYITSLFQVLPQQVSIEAIQEVEMLPRPPKVTKEEHFQLHHQMHYSQQITVSLAQGYERTSSPKPRFKSYAYTQAAYVTTSDPTRSPFPSQHLEAPEDKSFGSSLMESEVNLDRYQTALEEVLSWLLSAEDTLQAQGEISNDVEVVKDQFHTHEGYMMDLTAHQGRVGNILQLGSKLIGTGKLSEDEETEVQEQMNLLNSRWECLRVASMEKQSNLHRVLMDLQNQKLKELNDWLTKTEERTRKMEEEPLGPDLEDLKRQVQQHKVLQEDLEQEQVRVNSLTHMVVVVDESSGDHATAALEEQLKVLGDRWANICRWTEDRWVLLQDILLKWQRLTEEQCLFSAWLSEKEDAVNKIHTTGFKDQNEMLSSLQKLAVLKADLEKKKQSMGKLYSLKQDLLSTLKNKSVTQKTEAWLDNFARCWDNLVQKLEKSTAQIAAHPNVQKVVLVSSASDIPVQSHRTSEISIPADLDKTITELADWLVLIDQMLKSNIVTVGDVEEINKTVSRMKITKADLEQRHPQLDYVFTLAQNLKNKASSSDMRTAITEKLERVKNQWDGTQHGVELRQQQLEDMIIDSLQWDDHREETEELMRKYEARLYILQQARRDPLTKQISDNQILLQELGPGDGIVMAFDNVLQKLLEEYGSDDTRNVKETTEYLKTSWINLKQSIADRQNALEAEWRTVQASRRDLENFLKWIQEAETTVNVLVDASHRENALQDSILARELKQQMQDIQAEIDAHNDIFKSIDGNRQKMVKALGNSEEATMLQHRLDDMNQRWNDLKAKSASIRAHLEASAEKWNRLLMSLEELIKWLNMKDEELKKQMPIGGDVPALQLQYDHCKALRRELKEKEYSVLNAVDQARVFLADQPIEAPEEPRRNLQSKTELTPEERAQKIAKAMRKQSSEVKEKWESLNAVTSNWQKQVDKALEKLRDLQGAMDDLDADMKEAESVRNGWKPVGDLLIDSLQDHIEKIMAFREEIAPINFKVKTVNDLSSQLSPLDLHPSLKMSRQLDDLNMRWKLLQVSVDDRLKQLQEAHRDFGPSSQHFLSTSVQLPWQRSISHNKVPYYINHQTQTTCWDHPKMTELFQSLADLNNVRFSAYRTAIKIRRLQKALCLDLLELSTTNEIFKQHKLNQNDQLLSVPDVINCLTTTYDGLEQMHKDLVNVPLCVDMCLNWLLNVYDTGRTGKIRVQSLKIGLMSLSKGLLEEKYRYLFKEVAGPTEMCDQRQLGLLLHDAIQIPRQLGEVAAFGGSNIEPSVRSCFQQNNNKPEISVKEFIDWMHLEPQSMVWLPVLHRVAAAETAKHQAKCNICKECPIVGFRYRSLKHFNYDVCQSCFFSGRTAKGHKLHYPMVEYCIPTTSGEDVRDFTKVLKNKFRSKKYFAKHPRLGYLPVQTVLEGDNLETPITLISMWPEHYDPSQSPQLFHDDTHSRIEQYATRLAQMERTNGSFLTDSSSTTGSVEDEHALIQQYCQTLGGESPVSQPQSPAQILKSVEREERGELERIIADLEEEQRNLQVEYEQLKDQHLRRGLPVGSPPESIISPHHTSEDSELIAEAKLLRQHKGRLEARMQILEDHNKQLESQLHRLRQLLEQPESDSRINGVSPWASPQHSALSYSLDPDASGPQFHQAAGEDLLAPPHDTSTDLTEVMEQIHSTFPSCCPNVPSRPQAMMKCLLYLAFLFIGVNCKFTIVFPHNQKGNWKNVPSNYHYCPSSSDLNWHNDLIGTALQVKMPKSHKAIQADGWMCHASKWVTTCDFRWYGPKYITHSIRSFTPSVEQCKESIEQTKQGTWLNPGFPPQSCGYATVTDAEAAIVQVTPHHVLVDEYTGEWVDSQFINGKCSNDICPTVHNSTTWHSDYKVKGLCDSNLISTDITFFSEDGELSSLGKEGTGFRSNYFAYETGDKACKMQYCKHWGVRLPSGVWFEMADKDLFAAARFPECPEGSSISAPSQTSVDVSLIQDVERILDYSLCQETWSKIRAGLPISPVDLSYLAPKNPGTGPVFTIINGTLKYFETRYIRVDIAAPILSRMVGMISGTTTERELWDDWAPYEDVEIGPNGVLRTSLGYKFPLYMIGHGMLDSDLHLSSKAQVFEHPHIQDAASQLPDDETLFFGDTGLSKNPIEFVEGWFSSWKSSIASFFFIIGLIIGLFLVLRVGIYLCIKLKHTKKRQIYTDIEMNRLGK

SEQ ID NO: 42 - protein, 2412 aa, Artificial Sequence
  VSV-G-dystrophin-utrophin chimeric protein amino acid sequence
  MISC_FEATURE (1)..(2412)
MKCLLYLAFLFIGVNCKFTIVFPHNQKGNWKNVPSNYHYCPSSSDLNWHNDLIGTALQVKMPKSHKAIQADGWMCHASKWVTTCDFRWYGPKYITHSIRSFTPSVEQCKESIEQTKQGTWLNPGFPPQSCGYATVTDAEAAIVQVTPHHVLVDEYTGEWVDSQFINGKCSNDICPTVHNSTTWHSDYKVKGLCDSNLISTDITFFSEDGELSSLGKEGTGFRSNYFAYETGDKACKMQYCKHWGVRLPSGVWFEMADKDLFAAARFPECPEGSSISAPSQTSVDVSLIQDVERILDYSLCQETWSKIRAGLPISPVDLSYLAPKNPGTGPVFTIINGTLKYFETRYIRVDIAAPILSRMVGMISGTTTERELWDDWAPYEDVEIGPNGVLRTSLGYKFPLYMIGHGMLDSDLHLSSKAQVFEHPHIQDAASQLPDDETLFFGDTGLSKNPIEFVEGWFSSWKSSIASFFFIIGLIIGLFLVLRVGIYLCIKLKHTKKRQIYTDIEMNRLGKMLWWEEVEDCYEREDVQKKTFTKWVNAQFSKFGKQHIENLFSDLQDGRRLLDLLEGLTGQKLPKEKGSTRVHALNNVNKALRVLQNNNVDLVNIGSTDIVDGNHKLTLGLIWNIILHWQVKNVMKNIMAGLQQTNSEKILLSWVRQSTRNYPQVNVINFTTSWSDGLALNALIHSHRPDLFDWNSVVCQQSATQRLEHAFNIARYQLGIEKLLDPEDVDTTYPDKKSILMYITSLFQVLPQQVSIEAIQEVEMLPRPPKVTKEEHFQLHHQMHYSQQITVSLAQGYERTSSPKPRFKSYAYTQAAYVTTSDPTRSPFPSQHLEAPEDKSFGSSLMESEVNLDRYQTALEEVLSWLLSAEDTLQAQGEISNDVEVVKDQFHTHEGYMMDLTAHQGRVGNILQLGSKLIGTGKLSEDEETEVQEQMNLLNSRWECLRVASMEKQSNLHRVLMDLQNQKLKELNDWLTKTEERTRKMEEEPLGPDLEDLKRQVQQHKVLQEDLEQEQVRVNSLTHMVVVVDESSGDHATAALEEQLKVLGDRWANICRWTEDRWVLLQDILLKWQRLTEEQCLFSAWLSEKEDAVNKIHTTGFKDQNEMLSSLQKLAVLKADLEKKKQSMGKLYSLKQDLLSTLKNKSVTQKTEAWLDNFARCWDNLVQKLEKSTAQIAAHPNVQKVVLVSSASDIPVQSHRTSEISIPADLDKTITELADWLVLIDQMLKSNIVTVGDVEEINKTVSRMKITKADLEQRHPQLDYVFTLAQNLKNKASSSDMRTAITEKLERVKNQWDGTQHGVELRQQQLEDMIIDSLQWDDHREETEELMRKYEARLYILQQARRDPLTKQISDNQILLQELGPGDGIVMAFDNVLQKLLEEYGSDDTRNVKETTEYLKTSWINLKQSIADRQNALEAEWRTVQASRRDLENFLKWIQEAETTVNVLVDASHRENALQDSILARELKQQMQDIQAEIDAHNDIFKSIDGNRQKMVKALGNSEEATMLQHRLDDMNQRWNDLKAKSASIRAHLEASAEKWNRLLMSLEELIKWLNMKDEELKKQMPIGGDVPALQLQYDHCKALRRELKEKEYSVLNAVDQARVFLADQPIEAPEEPRRNLQSKTELTPEERAQKIAKAMRKQSSEVKEKWESLNAVTSNWQKQVDKALEKLRDLQGAMDDLDADMKEAESVRNGWKPVGDLLIDSLQDHIEKIMAFREEIAPINFKVKTVNDLSSQLSPLDLHPSLKMSRQLDDLNMRWKLLQVSVDDRLKQLQEAHRDFGPSSQHFLSTSVQLPWQRSISHNKVPYYINHQTQTTCWDHPKMTELFQSLADLNNVRFSAYRTAIKIRRLQKALCLDLLELSTTNEIFKQHKLNQNDQLLSVPDVINCLTTTYDGLEQMHKDLVNVPLCVDMCLNWLLNVYDTGRTGKIRVQSLKIGLMSLSKGLLEEKYRYLFKEVAGPTEMCDQRQLGLLLHDAIQIPRQLGEVAAFGGSNIEPSVRSCFQQNNNKPEISVKEFIDWMHLEPQSMVWLPVLHRVAAAETAKHQAKCNICKECPIVGFRYRSLKHFNYDVCQSCFFSGRTAKGHKLHYPMVEYCIPTTSGEDVRDFTKVLKNKFRSKKYFAKHPRLGYLPVQTVLEGDNLETPITLISMWPEHYDPSQSPQLFHDDTHSRIEQYATRLAQMERTNGSFLTDSSSTTGSVEDEHALIQQYCQTLGGESPVSQPQSPAQILKSVEREERGELERIIADLEEEQRNLQVEYEQLKDQHLRRGLPVGSPPESIISPHHTSEDSELIAEAKLLRQHKGRLEARMQILEDHNKQLESQLHRLRQLLEQPESDSRINGVSPWASPQHSALSYSLDPDASGPQFHQAAGEDLLAPPHDTSTDLTEVMEQIHSTFPSCCPNVPSRPQAM

What is claimed is:

1. A chimeric protein comprising a dystrophin complexed with a transportation region, wherein the transportation region allows for transport of the chimeric protein across a cellular membrane.

2. The chimeric protein according to claim 1, wherein the transportation region is at least one cell penetrating peptide.

3. The chimeric protein of claim 2, wherein said dystrophin is a truncated dystrophin.

4. The chimeric protein of claim 2, wherein said at least one cell penetrating peptide is selected from the group consisting of transcription transactivating protein, penetratin, transportan, transferrin receptor binding peptide, and combinations thereof.

5. The chimeric protein of claim 2, wherein said at least one cell penetrating peptide is attached to either the N-terminal or the N- and the C-terminal.

6. The chimeric protein of claim 5, wherein said at least one cell penetrating peptide is complexed at the N-terminal of the dystrophin.

7. The chimeric protein of claim 2, wherein at least a portion of a sequence of the chimeric protein has a nucleotide sequence selected from the group consisting of: SEQ. ID NO.: 13, SEQ. ID NO.: 15, SEQ. ID NO.: 17, SEQ. ID NO.: 19, and pharmaceutical equivalents thereof.

8. The chimeric protein of claim 2, wherein at least a portion of a sequence of the chimeric protein has an amino acid sequence selected from the group consisting of: SEQ. ID NO.: 14, SEQ. ID NO.: 16, SEQ. ID NO.: 18, SEQ. ID NO.: 20, and pharmaceutical equivalents thereof.

9. The chimeric protein of claim 3, wherein at least a portion of a sequence of the chimeric protein has a nucleotide sequence selected from the group consisting of: SEQ. ID NO.: 21, SEQ. ID NO.: 23, SEQ. ID NO.: 25, SEQ. ID NO.: 27, and pharmaceutical equivalents thereof.

10. The chimeric protein of claim 3, wherein at least a portion of a sequence of the chimeric protein has an amino acid sequence selected from the group consisting of: SEQ. ID NO.: 22, SEQ. ID NO.: 24, SEQ. ID NO.: 26, SEQ. ID NO.: 28, and pharmaceutical equivalents thereof.

11. The chimeric protein of claim 1, further comprising a utrophin complexed with said dystrophin.

12. The chimeric protein of claim 11, wherein at least a portion of a sequence of the chimeric protein has a nucleotide sequence selected from the group consisting of: SEQ. ID NO.: 29, SEQ. ID NO.: 31, SEQ. ID NO.: 33, SEQ. ID NO.: 35, SEQ. ID NO.: 37, and pharmaceutical equivalents thereof.

13. The chimeric protein of claim 8, wherein at least a portion of a sequence of the chimeric protein has an amino acid sequence selected from the group consisting of: SEQ. ID NO.: 30, SEQ. ID NO.: 32, SEQ. ID NO.: 34, SEQ. ID NO.: 36, SEQ. ID NO.: 38, and pharmaceutical equivalents thereof.

14. The chimeric protein of claim 1, wherein the transportation region is vesicular stomatitis virus G.

15. The chimeric protein of claim 14, further comprising a utrophin complexed with said dystrophin.

16. The chimeric protein of claim 15, wherein at least a portion of a sequence of the chimeric protein has a nucleotide sequence selected from the group consisting of: SEQ. ID NO.: 39, SEQ. ID NO.: 41, and pharmaceutical equivalents thereof.

17. The chimeric protein of claim 15, wherein at least a portion of a sequence of the chimeric protein has an amino acid sequence selected from the group consisting of: SEQ. ID NO.: 40, SEQ. ID NO.: 42, and pharmaceutical equivalents thereof.

18. A method of making a chimeric protein for use in the treatment of a condition, the method comprising the steps of:
cloning a nucleotide sequence into a vector, the nucleotide sequence coding for a chimeric protein comprising dystrophin complexed with a transportation region wherein the transportation region allows for transport of the chimeric protein across a cellular membrane;
transfecting the vector into a host cell;
proliferating the host cell; and
isolating the chimeric protein from the host cell.

19. The method of making a chimeric protein according to claim 18, wherein the nucleotide sequence comprises a sequence selected from the group consisting of: SEQ. ID NO.: 13, SEQ. ID NO.: 15, SEQ. ID NO.: 17, SEQ. ID NO.: 19, SEQ. ID NO.: 29, SEQ. ID NO.: 31, SEQ. ID NO.: 33, SEQ. ID NO.: 35, SEQ. ID NO.: 37, SEQ. ID NO.: 39, SEQ. ID NO.: 41.

20. The method of making a chimeric protein according to claim 18, wherein the dystrophin is a truncated dystrophin.

21. The method of making a chimeric protein according to claim 20, wherein the nucleotide sequence comprises a sequence selected from the group consisting of: SEQ. ID NO.: 21, SEQ. ID NO.: 23, SEQ. ID NO.: 25, SEQ. ID NO.: 27.

22. The method of making a chimeric protein for use in the treatment of a condition according to claim 18, wherein the medical condition includes a muscular dystrophy, diastrophic dysplasia, malignant melanoma, porphyria, alpha-1 antitrypsin deficiency, Aicardi-Goutieres syndrome, cystic fibrosis, progeria, Marfan syndrome, tuberous sclerosis, adrenoleukodystrophy, and the like.

23. The method of making a chimeric protein for use in the treatment of a condition according to claim 18, wherein the step of isolating the chimeric protein from the host cell includes the step of isolating the chimeric protein from a lysate of the host cell.
